(19) United States
(12) Patent Application Publication
(10) Pub. No.: US 2022/0380773 A1
(43) Pub. Date: Dec. 1, 2022

(54) COMPOUNDS AND METHODS FOR REDUCING APP EXPRESSION

(71) Applicant: Ionis Pharmaceuticals, Inc., Carlsbad, CA (US)

(72) Inventors: Susan M. Freier, San Diego, CA (US); Huynh-Hoa Bui, San Diego, CA (US); Holly Kordasiewicz, San Diego, CA (US); Eric E. Swayze, Encinitas, CA (US)

(73) Assignee: Ionis Pharmaceuticals, Inc., Carlsbad, CA (US)

(21) Appl. No.: 17/424,672

(22) PCT Filed: Jan. 29, 2020
(86) PCT No.: PCT/US2020/015701

§ 371 Date: Jul. 21, 2021

Related U.S. Application Data
(60) Provisional application No. 62/798,353, filed on Jan. 29, 2019.
(60) Provisional application No. 62/841,169, filed on Apr. 30, 2019.
(60) Provisional application No. 62/915,764, filed on Oct. 16, 2019.

(51) Int. Cl. C12N 15/113

(52) U.S. Cl. CPC C12N 15/1138; C12N 2310/315; C12N 2310/3341; C12N 2310/341; C12N 2310/321; C12N 2310/14

(57) ABSTRACT

Provided are compounds, methods, and pharmaceutical compositions for reducing the amount or activity of APP RNA in a cell or animal, and in certain instances reducing the amount of APP protein in a cell or animal Such compounds, methods, and pharmaceutical compositions are useful to ameliorate at least one symptom or hallmark of a neurodegenerative disease. Such symptoms and hallmarks include cognitive impairment, including a decline in memory and language skills, behavioral and psychological symptoms such as apathy and lack of motivation, gait disturbances and seizures, progressive dementia, and abnormal amyloid deposits.

### SEQUENCE LISTING

[0001] The present application is being filed along with a Sequence Listing in electronic format. The Sequence Listing is provided as a file entitled BIOL0351WOSEQ_ST25.txt, created on Jan. 22, 2020, which is 580 KB in size. The information in the electronic format of the sequence listing is incorporated herein by reference in its entirety.

### FIELD

[0002] Provided are compounds, methods, and pharmaceutical compositions for reducing the amount or activity of APP RNA in a cell or animal, and in certain instances reducing the amount of APP protein in a cell or animal. Certain such compounds, methods, and pharmaceutical compositions are useful to ameliorate at least one symptom or hallmark of a neurodegenerative disease. Such symptoms and hallmarks include cognitive impairment, including a decline in memory and language skills, behavioral and psychological symptoms such as apathy and lack of motivation, gait disturbances and seizures, progressive dementia, and abnormal amyloid deposits. Such neurodegenerative diseases include Alzheimer's Disease, Alzheimer's Disease in Down Syndrome patients, and Cerebral Amyloid Angiopathy.

### BACKGROUND

[0003] Alzheimer's Disease (AD) is the most common cause of age-associated dementia, affecting an estimated 5.7 million Americans a year (Alzheimer's Association. 2018 Alzheimer's Disease Facts and Figures. Alzheimer's Dement. 2018; 14(3):367-429). AD is characterized by the accumulation of β-amyloid plaques in the brain prior to the onset of overt clinical symptoms. Such overt clinical symptoms include cognitive impairment, including a decline in memory and language skills, behavioral and psychological symptoms such as apathy and lack of motivation, gait disturbances and seizures, and progressive dementia.

[0004] Patients with Down Syndrome (DS) can experience early-onset Alzheimer's disease (AD in DS), with amyloid plaque formation observed by age 40 in most DS patients, and Alzheimer's dementia observed by age 50 in more than 50% of Down syndrome patients.

[0005] Cerebral Amyloid Angiopathy (CAA) is a related disease that is characterized by the deposition of β-amyloid in blood vessels of the CNS. CAA is often observed in AD patients upon autopsy, but is also associated with aging in the absence of clinical signs of AD.

[0006] AD, AD in DS, and CAA are all characterized by the abnormal accumulation of β-amyloid plaques. β-amyloid (Aβ) is derived from amyloid precursor protein (APP) upon processing of APP by α-, β-, and γ-secretases. In addition to the 42-amino acid fragment Aβ, a variety of other fragments of APP are also formed, several of which are proposed to contribute to the onset of dementia in AD (reviewed in Nhan, et al., “The multifaceted nature of amyloid precursor protein and its proteolytic fragments: friends and foes”, Acta Neuropath., 2015, 129(1):1-19). The increased incidence of AD in DS patients is thought to be directly related to the increased copy number of the APP gene, which resides on chromosome 21.

[0007] Certain RNAi compounds have been described. RNAi compounds interact with the RNA silencing complex (RISC), ultimately resulting in cleavage of the target nucleic acid. See, e.g., Sharp et al., 2001, Genes Dev. 15: 485; Bernstein, et al., 2001, Nature, 409: 363; Nykanen, et al., 2001, Cell, 107: 309; Elbashir, et al., 2001, Genes Dev. 15: 188; Lima et al., (2012) Cell 150: 883-894.

[0008] Currently there is a lack of acceptable options for treating neurodegenerative diseases such as AD, AD in DS, and CAA. It is therefore an object herein to provide compounds, methods, and pharmaceutical compositions for the treatment of such diseases.

### SUMMARY OF THE INVENTION

[0009] Provided herein are compounds, methods and pharmaceutical compositions for reducing the amount or activity of APP RNA, and in certain embodiments reducing the amount of APP protein in a cell or animal. In certain embodiments, the animal has a neurodegenerative disease. In certain embodiments, the animal has Alzheimer's Disease (AD). In certain embodiments, the animal has Alzheimer's Disease in conjunction with Down Syndrome (AD in DS). In certain embodiments, the animal has Cerebral Amyloid Angiopathy (CAA). In certain embodiments, compounds useful for reducing expression of APP RNA are oligomeric compounds. In certain embodiments, compounds useful for reducing expression of APP RNA are modified oligonucleotides.

[0010] Also provided are methods useful for ameliorating at least one symptom or hallmark of a neurodegenerative disease. In certain embodiments, the neurodegenerative disease is Alzheimer's Disease. In certain embodiments, the neurodegenerative disease is Alzheimer's Disease in Down Syndrome patients. In certain embodiments, the neurodegenerative disease is Cerebral Amyloid Angiopathy (CAA). In certain embodiments, the symptom or hallmark includes cognitive impairment, including a decline in memory and language skills, behavioral and psychological symptoms such as apathy and lack of motivation, gait disturbances and seizures, progressive dementia, or abnormal amyloid deposits.

### DETAILED DESCRIPTION OF THE INVENTION

[0011] It is to be understood that both the foregoing general description and the following detailed description are exemplary and explanatory only and are not restrictive. Herein, the use of the singular includes the plural unless specifically stated otherwise. As used herein, the use of “or” means “and/or” unless stated otherwise. Furthermore, the use of the term “including” as well as other forms, such as “includes” and “included”, is not limiting. Also, terms such as “element” or “component” encompass both elements and components comprising one unit and elements and components that comprise more than one subunit, unless specifically stated otherwise.

[0012] The section headings used herein are for organizational purposes only and are not to be construed as limiting the subject matter described. All documents, or portions of documents, cited in this application, including, but not limited to, patents, patent applications, articles, books, and treatises, are hereby expressly incorporated-by-reference for the portions of the document discussed herein, as well as in their entirety.

### Definitions

[0013] Unless specific definitions are provided, the nomenclature used in connection with, and the procedures and techniques of, analytical chemistry, synthetic organic chemistry, and medicinal and pharmaceutical chemistry described herein are those well-known and commonly used in the art. Where permitted, all patents, applications, published applications and other publications and other data referred to throughout in the disclosure are incorporated by reference herein in their entirety.

[0014] Unless otherwise indicated, the following terms have the following meanings:

### Definitions

[0015] As used herein, “2′-deoxynucleoside” means a nucleoside comprising a 2′-H(H) deoxyribosyl sugar moiety. In certain embodiments, a 2′-deoxynucleoside is a 2′-β-D-deoxynucleoside and comprises a 2′-β-D-deoxyribosyl sugar moiety, which has the β-D configuration as found in naturally occurring deoxyribonucleic acids (DNA). In certain embodiments, a 2′-deoxynucleoside or a nucleoside comprising an unmodified 2′-deoxyribosyl sugar moiety may comprise a modified nucleobase or may comprise an RNA nucleobase (uracil).

[0016] As used herein, “2′-substituted nucleoside” means a nucleoside comprising a 2′-substituted sugar moiety. As used herein, “2′-substituted” in reference to a sugar moiety means a sugar moiety comprising at least one 2′-substituent group other than H or OH.

[0017] As used herein, “3′ target site” refers to the 3′-most nucleotide of a target nucleic acid which is complementary to an antisense oligonucleotide, when the antisense oligonucleotide is hybridized to the target nucleic acid.

[0018] As used herein, “5′ target site” refers to the 5′-most nucleotide of a target nucleic acid which is complementary to an antisense oligonucleotide, when the antisense oligonucleotide is hybridized to the target nucleic acid.

[0019] As used herein, “5-methyl cytosine” means a cytosine modified with a methyl group attached to the 5 position. A 5-methyl cytosine is a modified nucleobase.

[0020] As used herein, “abasic sugar moiety” means a sugar moiety of a nucleoside that is not attached to a nucleobase. Such abasic sugar moieties are sometimes referred to in the art as “abasic nucleosides.”

[0021] As used herein, “administration” or “administering” means providing a pharmaceutical agent or composition to an animal.

[0022] As used herein, “animal” means a human or non-human animal.

[0023] As used herein, “antisense activity” means any detectable and/or measurable change attributable to the hybridization of an antisense compound to its target nucleic acid. In certain embodiments, antisense activity is a decrease in the amount or expression of a target nucleic acid or protein encoded by such target nucleic acid compared to target nucleic acid levels or target protein levels in the absence of the antisense compound.

[0024] As used herein, “antisense compound” means an oligomeric compound capable of achieving at least one antisense activity.

[0025] As used herein, “antisense oligonucleotide” means an oligonucleotide, including the oligonucleotide portion of an oligomeric compound that is complementary to a target nucleic acid and is capable of achieving at least one antisense activity. Antisense oligonucleotides include but are not limited to antisense RNAi oligonucleotides and antisense RNase H oligonucleotides.

[0026] As used herein, “ameliorate” in reference to a treatment means improvement in at least one symptom relative to the same symptom in the absence of the treatment. In certain embodiments, amelioration is the reduction in the severity or frequency of a symptom or the delayed onset or slowing of progression in the severity or frequency of a symptom. In certain embodiments, the symptom or hallmark is cognitive impairment, including a decline in memory and language skills, behavioral and psychological symptoms such as apathy and lack of motivation, gait disturbances and seizures, progressive dementia, or abnormal amyloid deposits.

[0027] As used herein, “bicyclic nucleoside” or “BNA” means a nucleoside comprising a bicyclic sugar moiety.

[0028] As used herein, “bicyclic sugar” or “bicyclic sugar moiety” means a modified sugar moiety comprising two rings, wherein the second ring is formed via a bridge connecting two of the atoms in the first ring thereby forming a bicyclic structure. In certain embodiments, the first ring of the bicyclic sugar moiety is a furanosyl moiety. In certain embodiments, the bicyclic sugar moiety does not comprise a furanosyl moiety.

[0029] As used herein, “blunt” or “blunt ended” in reference to a duplex formed by two oligonucleotides mean that there are no terminal unpaired nucleotides (i.e. no overhanging nucleotides). One or both ends of a double-stranded RNAi compound can be blunt.

[0030] As used herein, “cleavable moiety” means a bond or group of atoms that is cleaved under physiological conditions, for example, inside a cell, an animal, or a human.

[0031] As used herein, “complementary” in reference to an oligonucleotide means that at least 70% of the nucleobases of the oligonucleotide or one or more regions thereof and the nucleobases of another nucleic acid or one or more regions thereof are capable of hydrogen bonding with one another when the nucleobase sequence of the oligonucleotide and the other nucleic acid are aligned in opposing directions. Complementary nucleobases means nucleobases that are capable of forming hydrogen bonds with one another. Complementary nucleobase pairs include adenine (A) and thymine (T), adenine (A) and uracil (U), cytosine (C) and guanine (G), 5-methyl cytosine (mC) and guanine (G). Certain modified nucleobases that pair with natural nucleobases or with other modified nucleobases are known in the art. For example, inosine can pair with adenosine, cytosine, or uracil. Complementary oligonucleotides and/or nucleic acids need not have nucleobase complementarity at each nucleoside. Rather, some mismatches are tolerated. As used herein, “fully complementary” or “100% complementary” in reference to oligonucleotides means that oligonucleotides are complementary to another oligonucleotide or nucleic acid at each nucleoside of the oligonucleotide.

[0032] As used herein, “conjugate group” means a group of atoms that is directly attached to an oligonucleotide. Conjugate groups include a conjugate moiety and a conjugate linker that attaches the conjugate moiety to the oligonucleotide.

[0033] As used herein, “conjugate linker” means a single bond or a group of atoms comprising at least one bond that connects a conjugate moiety to an oligonucleotide.

[0034] As used herein, “conjugate moiety” means a group of atoms that is attached to an oligonucleotide via a conjugate linker.

[0035] As used herein, “contiguous” in the context of an oligonucleotide refers to nucleosides, nucleobases, sugar moieties, or internucleoside linkages that are immediately adjacent to each other. For example, “contiguous nucleobases” means nucleobases that are immediately adjacent to each other in a sequence.

[0036] As used herein, “constrained ethyl” or “cEt” or “cEt modified sugar moiety” means a β-D ribosyl bicyclic sugar moiety wherein the second ring of the bicyclic sugar is formed via a bridge connecting the 4′-carbon and the 2′-carbon of the β-D ribosyl sugar moiety, wherein the bridge has the formula 4′-CH(CH₃)—O-2′, and wherein the methyl group of the bridge is in the S configuration.

[0037] As used herein, “cEt nucleoside” means a nucleoside comprising a cEt modified sugar moiety.

[0038] As used herein, “chirally enriched population” means a plurality of molecules of identical molecular formula, wherein the number or percentage of molecules within the population that contain a particular stereochemical configuration at a particular chiral center is greater than the number or percentage of molecules expected to contain the same particular stereochemical configuration at the same particular chiral center within the population if the particular chiral center were stereorandom. Chirally enriched populations of molecules having multiple chiral centers within each molecule may contain one or more stereorandom chiral centers. In certain embodiments, the molecules are modified oligonucleotides. In certain embodiments, the molecules are oligomeric compounds comprising modified oligonucleotides.

[0039] As used herein, “double-stranded” means a duplex formed by complementary strands of nucleic acids (including, but not limited to oligonucleotides) hybridized to one another. In certain embodiments, the two strands of a double-stranded region are separate molecules. In certain embodiments, the two strands are regions of the same molecule that has folded onto itself (e.g., a hairpin structure).

[0040] As used herein, “duplex” or “duplex region” means the structure formed by two oligonucleotides or portions thereof that are hybridized to one another.

[0041] As used herein, “gapmer” means a modified oligonucleotide comprising an internal region having a plurality of nucleosides that support RNase H cleavage positioned between external regions having one or more nucleosides, wherein at least one of the nucleosides comprising the internal region is chemically distinct from at least one nucleoside of each of the external regions. Specifically, the nucleosides that define the boundaries of the internal region and each external region must be chemically distinct. The internal region may be referred to as the “gap” and the external regions may be referred to as the “wings.” Unless otherwise indicated, “gapmer” refers to a sugar motif. In certain embodiments, the sugar moiety of each nucleoside of the gap is a 2′-β-D-deoxyribosyl sugar moiety. In certain embodiments, the gap comprises one 2′-substituted nucleoside at position 1, 2, 3, 4, or 5 of the gap, and the remainder of the nucleosides of the gap are 2′-β-D-deoxynucleosides. Unless otherwise indicated, a gapmer may comprise one or more modified internucleoside linkages and/or modified nucleobases and such modifications do not necessarily follow the gapmer pattern of the sugar modifications. As used herein, the term “mixed gapmer” indicates a gapmer having a gap comprising 2′-β-D-deoxynucleosides and wings comprising modified nucleosides comprising at least two different sugar modifications.

[0042] As used herein, “hotspot region” is a range of nucleobases on a target nucleic acid that is amenable to oligomeric compound-mediated reduction of the amount or activity of the target nucleic acid.

[0043] As used herein, “hybridization” means the pairing or annealing of complementary oligonucleotides and/or nucleic acids. While not limited to a particular mechanism, the most common mechanism of hybridization involves hydrogen bonding, which may be Watson-Crick, Hoogsteen or reversed Hoogsteen hydrogen bonding, between complementary nucleobases.

[0044] As used herein, “internucleoside linkage” is the covalent linkage between adjacent nucleosides in an oligonucleotide. As used herein “modified internucleoside linkage” means any internucleoside linkage other than a phosphodiester internucleoside linkage. “Phosphorothioate internucleoside linkage” is a modified internucleoside linkage in which one of the non-bridging oxygen atoms of a phosphodiester internucleoside linkage is replaced with a sulfur atom.

[0045] As used herein, “inverted nucleoside” means a nucleotide having a 3′ to 3′ and/or 5′ to 5′ internucleoside linkage, as shown herein.

[0046] As used herein, “inverted sugar moiety” means the sugar moiety of an inverted nucleoside or an abasic sugar moiety having a 3′ to 3′ and/or 5′ to 5′ internucleoside linkage.

[0047] As used herein, “linker-nucleoside” means a nucleoside that links, either directly or indirectly, an oligonucleotide to a conjugate moiety. Linker-nucleosides are located within the conjugate linker of an oligomeric compound. Linker-nucleosides are not considered part of the oligonucleotide portion of an oligomeric compound even if they are contiguous with the oligonucleotide.

[0048] “Lipid nanoparticle” or “LNP” is a vesicle comprising a lipid layer encapsulating a pharmaceutically active molecule, such as a nucleic acid molecule, e.g., an RNAi or a plasmid from which an RNAi is transcribed. LNPs are described in, for example, U.S. Pat. Nos. 6,858,225, 6,815,432, 8,158,601, and 8,058,069, the entire contents of which are hereby incorporated herein by reference.

[0049] As used herein, “non-bicyclic modified sugar moiety” means a modified sugar moiety that comprises a modification, such as a substituent, that does not form a bridge between two atoms of the sugar to form a second ring.

[0050] As used herein, “mismatch” or “non-complementary” means a nucleobase of a first nucleic acid sequence that is not complementary with the corresponding nucleobase of a second nucleic acid sequence or target nucleic acid when the first and second nucleic acid sequences are aligned.

[0051] As used herein, “MOE” means O-methoxyethyl. “2′-MOE” or “2′-MOE modified sugar” means a 2′-OCH₂CH₂OCH₃ group in place of the 2′—OH group of a ribosyl sugar moiety. As used herein, “2′-MOE nucleoside” means a nucleoside comprising a 2′-MOE sugar moiety.

[0052] As used herein, “motif” means the pattern of unmodified and/or modified sugar moieties, nucleobases, and/or internucleoside linkages, in an oligonucleotide.

[0053] As used herein, “neurodegenerative disease” means a condition marked by progressive loss of function or structure, including loss of neuronal function and death of neurons. In certain embodiments, the neurodegenerative disease is Alzheimer's Disease. In certain embodiments, the neurodegenerative disease is Alzheimer's Disease in Down Syndrome patients. In certain embodiments, the neurodegenerative disease is Cerebral Amyloid Angiopathy.

[0054] As used herein, “nucleobase” means an unmodified nucleobase or a modified nucleobase. A nucleobase is a heterocyclic moiety. As used herein an “unmodified nucleobase” is adenine (A), thymine (T), cytosine (C), uracil (U), or guanine (G). As used herein, a “modified nucleobase” is a group of atoms other than unmodified A, T, C, U, or G capable of pairing with at least one other nucleobase. A “5-methyl cytosine” is a modified nucleobase. A universal base is a modified nucleobase that can pair with any one of the five unmodified nucleobases.

[0055] As used herein, “nucleobase sequence” means the order of contiguous nucleobases in a nucleic acid or oligonucleotide independent of any sugar or internucleoside linkage modification.

[0056] As used herein, “nucleoside” means a compound or fragment of a compound comprising a nucleobase and a sugar moiety. The nucleobase and sugar moiety are each, independently, unmodified or modified.

[0057] As used herein, “nucleoside overhang” refers to unpaired nucleotides at either or both ends of a duplex formed by hybridization of an antisense RNAi oligonucleotide and a sense RNAi oligonucleotide.

[0058] As used herein, “modified nucleoside” means a nucleoside comprising a modified nucleobase and/or a modified sugar moiety.

[0059] As used herein, “linked nucleosides” are nucleosides that are connected in a contiguous sequence (i.e., no additional nucleosides are presented between those that are linked).

[0060] As used herein, “oligomeric compound” means an oligonucleotide and optionally one or more additional features, such as a conjugate group or terminal group. An oligomeric compound may be paired with a second oligomeric compound that is complementary to the first oligomeric compound or may be unpaired. A “singled-stranded oligomeric compound” is an unpaired oligomeric compound. The term “oligomeric duplex” means a duplex formed by two oligomeric compounds having complementary nucleobase sequences. Each oligomeric compound of an oligomeric duplex may be referred to as a “duplexed oligomeric compound.”

[0061] As used herein, “oligonucleotide” means a polymer of linked nucleosides connected via internucleoside linkages, wherein each nucleoside and internucleoside linkage may be modified or unmodified. Unless otherwise indicated, oligonucleotides consist of 8-50 linked nucleosides. An oligonucleotide may be paired with a second oligonucleotide that is complementary to the oligonucleotide or it may be unpaired. A “single-stranded oligonucleotide” is an unpaired oligonucleotide. A “double-stranded oligonucleotide” is an oligonucleotide that is paired with a second oligonucleotide. An “oligonucleotide duplex” means a duplex formed by two paired oligonucleotides having complementary nucleobase sequences. Each oligo of an oligonucleotide duplex is a “duplexed oligonucleotide” or a “double-stranded oligonucleotide”.

[0062] As used herein, “modified oligonucleotide” means an oligonucleotide, wherein at least one nucleoside or internucleoside linkage is modified. As used herein, “unmodified oligonucleotide” means an oligonucleotide that does not comprise any nucleoside modifications or internucleoside modifications. Thus, each nucleoside of an unmodified oligonucleotide is a DNA or RNA nucleoside and each internucleoside linkage is a phosphodiester linkage.

[0063] As used herein, “pharmaceutically acceptable carrier or diluent” means any substance suitable for use in administering to an animal. Certain such carriers enable pharmaceutical compositions to be formulated as, for example, tablets, pills, dragees, capsules, liquids, gels, syrups, slurries, suspension and lozenges for the oral ingestion by a subject. In certain embodiments, a pharmaceutically acceptable carrier or diluent is sterile water, sterile saline, sterile buffer solution or sterile artificial cerebrospinal fluid.

[0064] As used herein “pharmaceutically acceptable salts” means physiologically and pharmaceutically acceptable salts of compounds. Pharmaceutically acceptable salts retain the desired biological activity of the parent compound and do not impart undesired toxicological effects thereto.

[0065] As used herein “pharmaceutical composition” means a mixture of substances suitable for administering to a subject. For example, a pharmaceutical composition may comprise an oligomeric compound and a sterile aqueous solution. In certain embodiments, a pharmaceutical composition shows activity in free uptake assay in certain cell lines.

[0066] As used herein “prodrug” means a therapeutic agent in a first form outside the body that is converted to a second form within an animal or cells thereof. Typically, conversion of a prodrug within the animal is facilitated by the action of an enzymes (e.g., endogenous or viral enzyme) or chemicals present in cells or tissues and/or by physiologic conditions. In certain embodiments, the first form of the prodrug is less active than the second form.

[0067] As used herein, “reducing or inhibiting the amount or activity” refers to a reduction or blockade of the transcriptional expression or activity relative to the transcriptional expression or activity in an untreated or control sample and does not necessarily indicate a total elimination of transcriptional expression or activity.

[0068] As used herein, “RNAi compound” means an antisense compound that acts, at least in part, through RISC or Ago2 to modulate a target nucleic acid and/or protein encoded by a target nucleic acid. RNAi compounds include, but are not limited to double-stranded siRNA, single-stranded RNA (ssRNA), and microRNA, including microRNA mimics. RNAi compounds may comprise conjugate groups and/or terminal groups. In certain embodiments, an RNAi compound modulates the amount, activity, and/or splicing of a target nucleic acid. The term RNAi compound excludes antisense compounds that act through RNase H.

[0069] As used herein, “RNAi oligonucleotide” means an antisense RNAi oligonucleotide or a sense RNAi oligonucleotide.

[0070] As used herein, “antisense RNAi oligonucleotide” means an oligonucleotide comprising a region that is complementary to a target sequence, and which includes at least one chemical modification suitable for RNAi.

[0071] As used herein, “sense RNAi oligonucleotide” means an oligonucleotide comprising a region that is complementary to a region of an antisense RNAi oligonucleotide, and which is capable of forming a duplex with such antisense RNAi oligonucleotide. A duplex formed by an antisense RNAi oligonucleotide and a sense RNAi oligonucleotide is referred to as a double-stranded RNAi compound (dsRNAi) or a short interfering RNA (siRNA).

[0072] As used herein, “RNase H compound” means an antisense compound that acts, at least in part, through RNase H to modulate a target nucleic acid and/or protein encoded by a target nucleic acid. In certain embodiments, RNase H compounds are single-stranded. In certain embodiments, RNase H compounds are double-stranded. RNase H compounds may comprise conjugate groups and/or terminal groups. In certain embodiments, an RNase H compound modulates the amount or activity of a target nucleic acid. The term RNase H compound excludes antisense compounds that act principally through RISC/Ago2.

[0073] As used herein, “antisense RNase H oligonucleotide” means an oligonucleotide comprising a region that is complementary to a target sequence, and which includes at least one chemical modification suitable for RNase H-mediated nucleic acid reduction.

[0074] As used herein, “self-complementary” in reference to an oligonucleotide means an oligonucleotide that at least partially hybridizes to itself.

[0075] As used herein, “single-stranded” means a nucleic acid (including but not limited to an oligonucleotide) that is unpaired and is not part of a duplex. Single-stranded compounds are capable of hybridizing with complementary nucleic acids to form duplexes, at which point they are no longer single-stranded.

[0076] As used herein, “stabilized phosphate group” means a 5′-phosphate analog that is metabolically more stable than a 5′-phosphate as naturally occurs on DNA or RNA.

[0077] As used herein, “standard cell assay” means the assay described in Examples 1 or 5 and reasonable variations thereof.

[0078] As used herein, “stereorandom chiral center” in the context of a population of molecules of identical molecular formula means a chiral center having a random stereochemical configuration. For example, in a population of molecules comprising a stereorandom chiral center, the number of molecules having the (S) configuration of the stereorandom chiral center may be but is not necessarily the same as the number of molecules having the (R) configuration of the stereorandom chiral center. The stereochemical configuration of a chiral center is considered random when it is the result of a synthetic method that is not designed to control the stereochemical configuration. In certain embodiments, a stereorandom chiral center is a stereorandom phosphorothioate internucleoside linkage.

[0079] As used herein, “sugar moiety” means an unmodified sugar moiety or a modified sugar moiety. As used herein, “unmodified sugar moiety” means a 2′-OH(H) ribosyl moiety, as found in RNA (an “unmodified RNA sugar moiety”), or a 2′-H(H) deoxyribosyl sugar moiety, as found in DNA (an “unmodified DNA sugar moiety”). Unmodified sugar moieties have one hydrogen at each of the 1′, 3′, and 4′ positions, an oxygen at the 3′ position, and two hydrogens at the 5′ position. As used herein, “modified sugar moiety” or “modified sugar” means a modified furanosyl sugar moiety or a sugar surrogate.

[0080] As used herein, “sugar surrogate” means a modified sugar moiety having other than a furanosyl moiety that can link a nucleobase to another group, such as an internucleoside linkage, conjugate group, or terminal group in an oligonucleotide. Modified nucleosides comprising sugar surrogates can be incorporated into one or more positions within an oligonucleotide and such oligonucleotides are capable of hybridizing to complementary oligomeric compounds or target nucleic acids.

[0081] As used herein, “symptom or hallmark” means any physical feature or test result that indicates the existence or extent of a disease or disorder. In certain embodiments, a symptom is apparent to a subject or to a medical professional examining or testing said subject. In certain embodiments, a hallmark is apparent upon invasive diagnostic testing, including, but not limited to, post-mortem tests.

[0082] As used herein, “target nucleic acid” and “target RNA” mean a nucleic acid that an antisense compound is designed to affect. Target RNA means an RNA transcript and includes pre-mRNA and mRNA unless otherwise specified.

[0083] As used herein, “target region” means a portion of a target nucleic acid to which an oligomeric compound is designed to hybridize.

[0084] As used herein, “terminal group” means a chemical group or group of atoms that is covalently linked to a terminus of an oligonucleotide.

[0085] As used herein, “therapeutically effective amount” means an amount of a pharmaceutical agent or composition that provides a therapeutic benefit to an animal. For example, a therapeutically effective amount improves a symptom of a disease.

### CERTAIN EMBODIMENTS

[0086] The present disclosure provides the following non-limiting numbered embodiments:
[0087] Embodiment 1. An oligomeric compound comprising a modified oligonucleotide consisting of 12 to 30 linked nucleosides wherein the nucleobase sequence of the modified oligonucleotide is at least 80% complementary to an equal length portion of a APP RNA, and wherein the modified oligonucleotide comprises at least one modification selected from a modified sugar, a sugar surrogate, and a modified internucleoside linkage.
[0088] Embodiment 2. An oligomeric compound comprising a modified oligonucleotide consisting of 12 to 30 linked nucleosides and having a nucleobase sequence comprising at least 12, 13, 14, 15, 16, 17, or 18 nucleobases of any of SEQ ID NOS: 12-501 Embodiment 3. An oligomeric compound comprising a modified oligonucleotide consisting of 12 to 30 linked nucleosides and having a nucleobase sequence comprising at least 12, 13, 14, 15, 16, 17, 18, 19, or 20 nucleobases of any of SEQ ID NOS: 502-516.
[0089] Embodiment 4. An oligomeric compound comprising a modified oligonucleotide consisting of 12 to 30 linked nucleosides and having a nucleobase sequence complementary to at least 8, at least 9, at least 10, at least 11, at least 12, at least 13, at least 14, at least 15, at least 16, at least 17, at least 18, at least 19, or at least 20 contiguous nucleobases of:
   [0090] an equal length portion of nucleobases 40-78 of SEQ ID NO: 1;
   [0091] an equal length portion of nucleobases 69-146 of SEQ ID NO: 1;
   [0092] an equal length portion of nucleobases 83-129 of SEQ ID NO: 1;
   [0093] an equal length portion of nucleobases 194-231 of SEQ ID NO: 1;
   [0094] an equal length portion of nucleobases 194-238 of SEQ ID NO: 1;
   [0095] an equal length portion of nucleobases 236-268 of SEQ ID NO: 1;
   [0096] an equal length portion of nucleobases 258-284 of SEQ ID NO: 1;
   [0097] an equal length portion of nucleobases 285-311 of SEQ ID NO: 1;
   [0098] an equal length portion of nucleobases 296-321 of SEQ ID NO: 1;
   [0099] an equal length portion of nucleobases 307-330 of SEQ ID NO: 1;
   [0100] an equal length portion of nucleobases 339-383 of SEQ ID NO: 1;
   [0101] an equal length portion of nucleobases 415-439 of SEQ ID NO: 1;
   [0102] an equal length portion of nucleobases 415-477 of SEQ ID NO: 1;
   [0103] an equal length portion of nucleobases 477-506 of SEQ ID NO: 1;
   [0104] an equal length portion of nucleobases 477-523 of SEQ ID NO: 1;
   [0105] an equal length portion of nucleobases 477-541 of SEQ ID NO: 1;
   [0106] an equal length portion of nucleobases 530-557 of SEQ ID NO: 1;
   [0107] an equal length portion of nucleobases 636-661 of SEQ ID NO: 1;
   [0108] an equal length portion of nucleobases 652-697 of SEQ ID NO: 1;
   [0109] an equal length portion of nucleobases 920-950 of SEQ ID NO: 1;
   [0110] an equal length portion of nucleobases 1152-1179 of SEQ ID NO: 1;
   [0111] an equal length portion of nucleobases 1227-1265 of SEQ ID NO: 1;
   [0112] an equal length portion of nucleobases 1227-1274 of SEQ ID NO: 1;
   [0113] an equal length portion of nucleobases 1518-1543 of SEQ ID NO: 1;
   [0114] an equal length portion of nucleobases 1531-1593 of SEQ ID NO: 1;
   [0115] an equal length portion of nucleobases 1544-1593 of SEQ ID NO: 1;
   [0116] an equal length portion of nucleobases 1635-1657 of SEQ ID NO: 1;
   [0117] an equal length portion of nucleobases 1778-1800 of SEQ ID NO: 1;
   [0118] an equal length portion of nucleobases 1882-1908 of SEQ ID NO: 1; or
   [0119] an equal length portion of nucleobases 2051-2074 of SEQ ID NO: 1.
[0120] Embodiment 5. The oligomeric compound of any of embodiments 1-4, wherein the modified oligonucleotide has a nucleobase sequence that is at least 80%, 85%, 90%, 95%, or 100% complementary to any of the nucleobase sequences of SEQ ID NO: 1-7 when measured across the entire nucleobase sequence of the modified oligonucleotide.
[0121] Embodiment 6. The oligomeric compound of any of embodiments 1-5, wherein the modified oligonucleotide comprises at least one modified nucleoside.
[0122] Embodiment 7. The oligomeric compound of embodiment 6, wherein the modified oligonucleotide comprises at least one modified nucleoside comprising a modified sugar moiety.
[0123] Embodiment 8. The oligomeric compound of embodiment 7, wherein the modified oligonucleotide comprises at least one modified nucleoside comprising a bicyclic sugar moiety.
[0124] Embodiment 9. The oligomeric compound of embodiment 8, wherein the modified oligonucleotide comprises at least one modified nucleoside comprising a bicyclic sugar moiety having a 2′-4′ bridge, wherein the 2′-4′ bridge is selected from —O—CH₂—; and —O—CH(CH₃)—.
[0125] Embodiment 10. The oligomeric compound of any of embodiments 5-9, wherein the modified oligonucleotide comprises at least one modified nucleoside comprising a non-bicyclic modified sugar moiety.
[0126] Embodiment 11. The oligomeric compound of embodiment 7, wherein the modified oligonucleotide comprises at least one nucleoside comprising a bicyclic sugar moiety having a 2′-4′ bridge and at least one nucleoside comprising a non-bicyclic modified sugar moiety.
[0127] Embodiment 12. The oligomeric compound of embodiment 10 or 11, wherein the non-bicyclic modified sugar moiety is a 2′-MOE modified sugar moiety or a 2′-OMe modified sugar moiety.
[0128] Embodiment 13. The oligomeric compound of embodiment 11, wherein the bicyclic modified sugar moiety has a 2′-4′ bridge, wherein the 2′-4′ bridge is selected from —O—CH₂ and —O—CH(CH₃)—.
[0129] Embodiment 14. The oligomeric compound of any of embodiments 1-13, wherein the modified oligonucleotide comprises at least one modified nucleoside comprising a sugar surrogate.
[0130] Embodiment 15. The oligomeric compound of embodiment 14, wherein the modified oligonucleotide comprises at least one modified nucleoside comprising a sugar surrogate selected from morpholino and PNA.
[0131] Embodiment 16. The oligomeric compound of any of embodiments 1-13, wherein the modified oligonucleotide has a sugar motif comprising:
   [0132] a 5′-region consisting of 1-5 linked 5′-region nucleosides;
   [0133] a central region consisting of 6-10 linked central region nucleosides; and
   [0134] a 3′-region consisting of 1-5 linked 3′-region nucleosides; wherein
   [0135] each of the 5′-region nucleosides and each of the 3′-region nucleosides comprises a modified sugar moiety and each of the central region nucleosides comprises a 2′-β-D-deoxyribosyl sugar moiety.
[0136] Embodiment 17. The oligomeric compound of embodiment 16, wherein the modified oligonucleotide has a sugar motif comprising:
   [0137] a 5′-region consisting of 5 linked 5′-region nucleosides;
   [0138] a central region consisting of 10 linked central region nucleosides; and
   [0139] a 3′-region consisting of 5 linked 3′-region nucleosides; wherein
   [0140] each of the 5′-region nucleosides and each of the 3′-region nucleosides comprises either a cEt modified sugar moiety or a 2′-MOE modified sugar moiety, and each of the central region nucleosides comprises a 2′-β-D-deoxyribosyl sugar moiety.
[0141] Embodiment 18. The oligomeric compound of any of embodiments 1-17, wherein the modified oligonucleotide comprises at least one modified internucleoside linkage.
[0142] Embodiment 19. The oligomeric compound of embodiment 18, wherein each internucleoside linkage of the modified oligonucleotide is a modified internucleoside linkage.
[0143] Embodiment 20. The oligomeric compound of embodiment 18 or 19, wherein at least one internucleoside linkage is a phosphorothioate internucleoside linkage.
[0144] Embodiment 21. The oligomeric compound of embodiment 18 or 20, wherein the modified oligonucleotide comprises at least one phosphodiester internucleoside linkage.
[0145] Embodiment 22. The oligomeric compound of any of embodiments 18, 20, or 21, wherein each internucleoside linkage is independently selected from a phosphodiester internucleoside linkage or a phosphorothioate internucleoside linkage.
[0146] Embodiment 23. The oligomeric compound of any of embodiments 1-22, wherein the modified oligonucleotide comprises a modified nucleobase.
[0147] Embodiment 24. The oligomeric compound of embodiment 23, wherein the modified nucleobase is a 5-methyl cytosine.
[0148] Embodiment 25. The oligomeric compound of any of embodiments 1-24, wherein the modified oligonucleotide consists of 12-22, 12-20, 14-18, 14-20, 15-17, 15-25, 16-20, 16-18, 18-22 or 18-20 linked nucleosides.
[0149] Embodiment 26. The oligomeric compound of any of embodiments 1-25, wherein the modified oligonucleotide consists of 18 linked nucleosides.
[0150] Embodiment 27. The oligomeric compound of any of embodiments 1-25, wherein the modified oligonucleotide consists of 20 linked nucleosides.
[0151] Embodiment 28. The oligomeric compound of any of embodiments 1-27, consisting of the modified oligonucleotide.
[0152] Embodiment 29. The oligomeric compound of any of embodiments 1-27, comprising a conjugate group comprising a conjugate moiety and a conjugate linker.
[0153] Embodiment 30. The oligomeric compound of embodiment 29, wherein the conjugate linker consists of a single bond.
[0154] Embodiment 31. The oligomeric compound of embodiment 29, wherein the conjugate linker is cleavable.
[0155] Embodiment 32. The oligomeric compound of embodiment 29, wherein the conjugate linker comprises 1-3 linker-nucleosides.
[0156] Embodiment 33. The oligomeric compound of any of embodiments 29-32, wherein the conjugate group is attached to the modified oligonucleotide at the 5′-end of the modified oligonucleotide.
[0157] Embodiment 34. The oligomeric compound of any of embodiments 29-32, wherein the conjugate group is attached to the modified oligonucleotide at the 3′-end of the modified oligonucleotide.
[0158] Embodiment 35. The oligomeric compound of any of embodiments 1-27 and 29-34, comprising a terminal group.
[0159] Embodiment 36. The oligomeric compound of any of embodiments 1-35 wherein the oligomeric compound is a singled-stranded oligomeric compound.
[0160] Embodiment 37. The oligomeric compound of any of embodiments 1-31 or 33-36, wherein the oligomeric compound does not comprise linker-nucleosides.
[0161] Embodiment 38. An oligomeric duplex comprising an oligomeric compound of any of embodiments 1-27, 29-35, or 37.
[0162] Embodiment 39. An antisense compound comprising or consisting of an oligomeric compound of any of embodiments 1-37 or an oligomeric duplex of embodiment 38.
[0163] Embodiment 40. A pharmaceutical composition comprising an oligomeric compound of any of embodiments 1-37 or an oligomeric duplex of embodiment 38 and a pharmaceutically acceptable carrier or diluent.
[0164] Embodiment 41. The pharmaceutical composition of embodiment 40, wherein the pharmaceutically acceptable diluent is artificial cerebral spinal fluid, sterile saline, or PBS.
[0165] Embodiment 42. The pharmaceutical composition of embodiment 41, wherein the pharmaceutical composition consists essentially of the modified oligonucleotide and sterile saline.
[0166] Embodiment 43. A method comprising administering to an animal a pharmaceutical composition of any of embodiments 40-42.
[0167] Embodiment 44. A method of treating a disease associated with APP comprising administering to an individual having or at risk for developing a disease associated with APP a therapeutically effective amount of a pharmaceutical composition according to any of embodiments 40-42; and thereby treating the disease associated with APP.
[0168] Embodiment 45. The method of embodiment 44, wherein the APP-associated disease is Alzheimer's
[0169] Disease, Alzheimer's Disease in a Down Syndrome patient, or Cerebral Amyloid Angiopathy.
[0170] Embodiment 46. The method of any of embodiments 43-45, wherein at least one symptom or hallmark of the APP-associated disease is ameliorated.
[0171] Embodiment 47. The method of embodiment 46, wherein the symptom or hallmark is cognitive impairment, including a decline in memory and language skills, behavioral and psychological symptoms such as apathy and lack of motivation, gait disturbances and seizures, progressive dementia, and/or abnormal amyloid deposits.
[0172] Embodiment 48. An RNAi compound comprising an antisense RNAi oligonucleotide consisting of 17 to 30 linked nucleosides, wherein the nucleobase sequence of the antisense RNAi oligonucleotide comprises a targeting region comprising at least 15 contiguous nucleobases wherein the targeting region is at least 90% complementary to an equal length portion of an APP RNA, and wherein at least one nucleoside of the antisense RNAi oligonucleotide is a modified nucleoside comprising a modified sugar moiety or a sugar surrogate.
[0173] Embodiment 49. The RNAi compound of embodiment 48, wherein the antisense RNAi oligonucleotide consists of 18-25 linked nucleosides.
[0174] Embodiment 50. The RNAi compound of embodiment 48, wherein the antisense RNAi oligonucleotide consists of 20-25 linked nucleosides.
[0175] Embodiment 51. The RNAi compound of embodiment 48, wherein the antisense RNAi oligonucleotide consists of 21-23 linked nucleosides.
[0176] Embodiment 52. The RNAi compound of embodiment 48, wherein the antisense RNAi oligonucleotide consists of 21 linked nucleosides.
[0177] Embodiment 53. The RNAi compound of embodiment 48, wherein the antisense RNAi oligonucleotide consists of 23 linked nucleosides.
[0178] Embodiment 54. The RNAi compound of any of embodiments 48-53, wherein the targeting region of the antisense RNAi oligonucleotide is at least 95% complementary to the equal length portion of the APP RNA.
[0179] Embodiment 55. The RNAi compound of any of embodiments 48-53, wherein the targeting region of the antisense RNAi oligonucleotide is 100% complementary to the equal length portion of the APP RNA.
[0180] Embodiment 56. The RNAi compound of any of embodiments 48-55, wherein the targeting region of the antisense RNAi oligonucleotide comprises at least 19 contiguous nucleobases.
[0181] Embodiment 57. The RNAi compound of any of embodiments 48-55, wherein the targeting region of the antisense RNAi oligonucleotide comprises at least 21 contiguous nucleobases.
[0182] Embodiment 58. The RNAi compound of any of embodiments 48-55 wherein the targeting region of the antisense RNAi oligonucleotide comprises at least 25 contiguous nucleobases.
[0183] Embodiment 59. The RNAi compound of any embodiments 48-55, wherein the targeting region of the antisense RNAi oligonucleotide constitutes the entire nucleobase sequence of the antisense RNAi oligonucleotide.
[0184] Embodiment 60. The RNAi compound of any of embodiments 48-59 wherein the targeting region of the antisense oligonucleotide is complementary to an equal length portion of SEQ ID NOs: 1-7.
[0185] Embodiment 61. The RNAi compound of any of embodiments 48-60, wherein the APP RNA has the nucleobase sequence of any of SEQ ID NOs: 1-3 or SEQ ID NOs: 4-7.
[0186] Embodiment 62. The RNAi compound of any of embodiment 48-61, wherein the nucleobase sequence of the targeting region of the antisense RNAi compound is a least 12, 13, 14, 15, 16, 17, 18 19, 10, 21 nucleobases of any of SEQ ID NOs: 517-665, 815-840 or 867-888.
[0187] Embodiment 63. The RNAi compound of any of embodiments 48-62, wherein at least one nucleoside of the antisense RNAi oligonucleotide comprises a modified sugar moiety selected from: 2′-F, 2′-OMe, 2′-NMA, LNA, and cEt; or a sugar surrogate selected from GNA, and UNA.
[0188] Embodiment 64. The RNAi compound of any of embodiments 48-63, wherein each nucleoside of the antisense RNAi oligonucleotide comprises a modified sugar moiety or a sugar surrogate.
[0189] Embodiment 65. The compound of any of embodiments 48-64, wherein at least 80% of the nucleosides of the antisense RNAi oligonucleotide comprises a modified sugar moiety selected from 2′-F and 2′-OMe.
[0190] Embodiment 66. The RNAi compound of any of embodiments 65, wherein at least 90% of the nucleosides of the antisense RNAi oligonucleotide comprises a modified sugar moiety selected from 2′-F and 2′-OMe.
[0191] Embodiment 67. The RNAi compound of embodiment 66, wherein each nucleoside of the antisense RNAi oligonucleotide comprises a modified sugar moiety selected from 2′-F and 2′-OMe.
[0192] Embodiment 68. The RNAi compound of any of embodiments 48-67, wherein 1-4 nucleosides of the antisense RNAi oligonucleotide comprises a 2′-F modified sugar moiety.
[0193] Embodiment 69. The RNAi compound of embodiment 68, wherein at least 2 of the nucleosides of the antisense RNAi oligonucleotide comprising a 2′-F modified sugar moiety are adjacent to one another.
[0194] Embodiment 70. The RNAi compound of embodiment 69, wherein at least 3 nucleosides of the antisense RNAi oligonucleotide comprising a 2′-F modified sugar moiety are contiguous.
[0195] Embodiment 71. The RNAi compound of any of embodiments 48-66 or 68-70 wherein 1 nucleoside of the antisense RNAi oligonucleotide comprises GNA sugar surrogate.
[0196] Embodiment 72. The RNAi compound of embodiment 71, wherein the GNA sugar surrogate is (S)-GNA.
[0197] Embodiment 73. The RNAi compound of embodiment 71 or 72, wherein the nucleoside comprising the GNA sugar surrogate is at position 7 of the antisense RNAi oligonucleotide counting from the 5′-end.
[0198] Embodiment 74. The RNAi compound of any of embodiments 48-66 or 68-73 wherein 1 nucleoside of the antisense RNAi oligonucleotide is a UNA.
[0199] Embodiment 75. The RNAi compound of embodiment 74, wherein the nucleoside comprising the UNA sugar surrogate is at position 7 of the antisense RNAi oligonucleotide counting from the 5′-end.
[0200] Embodiment 76. The RNAi compound of any of embodiments 48-75, wherein at least one nucleoside of the antisense RNAi oligonucleotide comprises a modified nucleobase.
[0201] Embodiment 77. The RNAi compound of embodiment 76, wherein at least one nucleobase of the antisense RNAi oligonucleotide is inosine.
[0202] Embodiment 78. The RNAi compound of any of embodiments 48-77, wherein at least one internucleoside linkage of the antisense RNAi oligonucleotide is a modified internucleoside linkage.
[0203] Embodiment 79. The RNAi compound of embodiment 78, wherein at least one internucleoside linkage of the antisense RNAi oligonucleotide is a phosphorothioate internucleoside linkage.
[0204] Embodiment 80. The RNAi compound of any of embodiments 48-79, wherein each internucleoside linkage of the antisense RNAi oligonucleotide is selected from an unmodified phosphodiester internucleoside linkage and a phosphorothioate internucleoside linkage.
[0205] Embodiment 81. The RNAi compound of any of embodiments 79-80, wherein 1-3 internucleoside linkages at each end of the antisense RNAi oligonucleotide is a phosphorothioate internucleoside linkage.
[0206] Embodiment 82. The RNAi compound of embodiment 81, wherein 1-3 internucleoside linkages at each end of the antisense RNAi oligonucleotide is a phosphorothioate internucleoside linkage and all of the remaining internucleoside linkages of the antisense RNAi oligonucleotide are phosphodiester internucleoside linkages.
[0207] Embodiment 83. The RNAi compound of any of embodiments 48-82, comprising a sense RNAi oligonucleotide consisting of 17 to 30 linked nucleosides, wherein the nucleobase sequence of the sense RNAi oligonucleotide comprises an antisense-hybridizing region comprising least 15 contiguous nucleobases wherein the antisense-hybridizing region is at least 90% complementary to an equal length portion of the antisense RNAi oligonucleotide, wherein the sense RNAi oligonucleotide and the antisense RNAi oligonucleotide are hybridized to one another to form a duplex.
[0208] Embodiment 84. The RNAi compound of embodiment 83, wherein the sense RNAi oligonucleotide consists of 18-25 linked nucleosides.
[0209] Embodiment 85. The RNAi compound of embodiment 83, wherein the sense RNAi oligonucleotide consists of 20-25 linked nucleosides.
[0210] Embodiment 86. The RNAi compound of embodiment 83, wherein the sense RNAi oligonucleotide consists of 21-23 linked nucleosides.
[0211] Embodiment 87. The RNAi compound of embodiment 83, wherein the sense RNAi oligonucleotide consists of 21 linked nucleosides.
[0212] Embodiment 88. The RNAi compound of embodiment 83, wherein the sense RNAi oligonucleotide consists of 23 linked nucleosides.
[0213] Embodiment 89. The RNAi compound of any of embodiments 83-88, wherein the antisense-hybridizing region of the sense RNAi oligonucleotide is at least 95% complementary to the equal length portion of the antisense RNAi oligonucleotide.
[0214] Embodiment 90. The RNAi compound of any of embodiments 83-88, wherein the antisense-hybridizing region of the sense RNAi oligonucleotide is 100% complementary to the equal length portion of the antisense RNAi oligonucleotide.
[0215] Embodiment 91. The RNAi compound of any of embodiments 83-90, wherein the antisense-hybridizing region of the sense RNAi oligonucleotide comprises at least 20 contiguous nucleobases.
[0216] Embodiment 92. The RNAi compound of any of embodiments 83-90, wherein the antisense-hybridizing region of the sense RNAi oligonucleotide comprises at least 21 contiguous nucleobases.
[0217] Embodiment 93. The RNAi compound of any of embodiments 83-90, wherein the antisense-hybridizing region of the sense RNAi oligonucleotide comprises at least 25 contiguous nucleobases.
[0218] Embodiment 94. The RNAi compound of any embodiments 83-93, wherein the antisense-hybridizing region of the sense RNAi oligonucleotide constitutes the entire nucleobase sequence of the sense RNAi oligonucleotide.
[0219] Embodiment 95. The RNAi compound of any of embodiments 83-94, wherein 1-4 3′-most nucleosides of the antisense RNAi oligonucleotide are overhanging nucleosides.
[0220] Embodiment 96. The RNAi compound of any of embodiments 83-95, wherein 1-4 5′-most nucleosides of the antisense RNAi oligonucleotide are overhanging nucleosides.
[0221] Embodiment 97. The RNAi compound of any of embodiments 83-96, wherein 1-4 3′-most nucleosides of the sense RNAi oligonucleotide are overhanging nucleosides.
[0222] Embodiment 98. The RNAi compound of any of embodiments 83-97, wherein 1-4 4′-most nucleosides of the sense RNAi oligonucleotide are overhanging nucleosides.
[0223] Embodiment 99. The RNAi compound of any of embodiments 83-94, wherein the duplex is blunt ended at the 3′-end of the antisense RNAi oligonucleotide.
[0224] Embodiment 100. The RNAi compound of any of embodiments 83-94 or 99, wherein the duplex is blunt ended at the 5′-end of the antisense RNAi oligonucleotide.
[0225] Embodiment 101. The RNAi compound of any of embodiments 95-97, wherein at least one overhanging nucleoside is a deoxyribonucleoside.
[0226] Embodiment 102. The RNAi compound of any of embodiments 83-101, wherein at least one nucleoside of the sense RNAi oligonucleotide is a modified nucleoside.
[0227] Embodiment 103. The RNAi compound of embodiment 102, wherein at least one nucleoside of the sense RNAi oligonucleotide comprises a modified sugar moiety selected from: 2′-F, 2′-OMe, LNA, cEt, or a sugar surrogate selected from GNA, and UNA.
[0228] Embodiment 104. The RNAi compound of any of embodiments 83-103, wherein each nucleoside of the sense RNAi oligonucleotide comprises a modified sugar moiety or a sugar surrogate.
[0229] Embodiment 105. The RNAi compound of any of embodiments 83-104, wherein at least 80% of the nucleosides of the sense RNAi oligonucleotide comprises a modified sugar moiety selected from 2′-F and 2′-OMe.
[0230] Embodiment 106. The RNAi compound of embodiment 105, wherein each nucleoside of the sense RNAi oligonucleotide comprises a modified sugar moiety selected from 2′-F and 2′-OMe.
[0231] Embodiment 107. The RNAi compound of any of embodiments 83-106, wherein 1-4 nucleosides of the sense RNAi oligonucleotide comprises a 2′-F modified sugar moiety.
[0232] Embodiment 108. The RNAi compound of any of embodiments 83-107, wherein at least 2 nucleosides of the sense RNAi oligonucleotide comprising a 2′-F modified sugar moiety are adjacent to one another.
[0233] Embodiment 109. The RNAi compound of embodiment 108, wherein at least 3 nucleosides of the sense RNAi oligonucleotide comprising a 2′-F modified sugar moiety are contiguous.
[0234] Embodiment 110. The RNAi compound of any of embodiments 83-105 or 107-109 wherein at least one nucleoside of the sense RNAi oligonucleotide is a GNA.
[0235] Embodiment 111. The RNAi compound of any of embodiments 83-105 or 107-109 wherein one nucleoside of the sense RNAi oligonucleotide is a GNA.
[0236] Embodiment 112. The RNAi compound of embodiment 110 or 111, wherein the GNA sugar surrogate is (S)-GNA.
[0237] Embodiment 113. The RNAi compound of any of embodiments 83-105 or 107-109 wherein at least one nucleoside of the sense RNAi oligonucleotide is a UNA.
[0238] Embodiment 114. The RNAi compound of any of embodiments 83-105 or 107-109 wherein one nucleoside of the sense RNAi oligonucleotide is a UNA.
[0239] Embodiment 115. The RNAi compound of any of embodiments 83-114, wherein at least one nucleoside of the sense RNAi oligonucleotide comprises a modified nucleobase.
[0240] Embodiment 116. The RNAi compound of embodiment 115, wherein at least one nucleobase of the sense RNAi oligonucleotide is hypoxanthine.
[0241] Embodiment 117. The RNAi compound of any of embodiments 83-116, wherein at least one internucleoside linkage of the sense RNAi oligonucleotide is a modified internucleoside linkage.
[0242] Embodiment 118. The RNAi compound of embodiment 117, wherein at least one internucleoside linkage of the sense RNAi oligonucleotide is a phosphorothioate internucleoside linkage.
[0243] Embodiment 119. The RNAi compound of embodiment 118, wherein each internucleoside linkage of the sense RNAi oligonucleotide is selected from an unmodified phosphodiester internucleoside linkage and a phosphorothioate internucleoside linkage.
[0244] Embodiment 120. The RNAi compound of any of embodiments 117-119, wherein 1-3 internucleoside linkages at each end of the sense RNAi oligonucleotide is a phosphorothioate internucleoside linkage.
[0245] Embodiment 121. The RNAi compound of embodiment 120, wherein 1-3 internucleoside linkages at each end of the antisense RNAi oligonucleotide is a phosphorothioate internucleoside linkage and all of the remaining internucleoside linkages of the antisense RNAi oligonucleotide are phosphodiester internucleoside linkages.
[0246] Embodiment 122. The RNAi compound of any of embodiments 48-121 comprising a stabilized phosphate group attached to the 5′ position of the 5′-most nucleoside of the antisense RNAi oligonucleotide.
[0247] Embodiment 123. The RNAi compound of embodiment 122, wherein the stabilized phosphate group comprises a (E)-vinylphosphonate.
[0248] Embodiment 124. The RNAi compound of embodiment 122, wherein the stabilized phosphate group comprises a cyclopropyl phosphonate.
[0249] Embodiment 125. The RNAi compound of any of embodiments 48-124, wherein the compound comprises 1-5 abasic sugar moieties attached to one or both ends of the antisense RNA oligonucleotide.
[0250] Embodiment 126. The RNAi compound of embodiment 125, wherein the compound comprises one abasic sugar moiety attached to one or both ends of the antisense RNA oligonucleotide
[0251] Embodiment 127. The RNAi compound of embodiment 125 or 126, wherein each abasic sugar moiety is inverted.
[0252] Embodiment 128. The RNAi compound of any of embodiments 125-127, wherein the abasic sugar moieties are attached to the antisense RNA oligonucleotide through a phosphorothioate linkage.
[0253] Embodiment 129. The RNAi compound of any of embodiments 48-128, wherein the compound comprises 1-5 abasic sugar moieties attached to one or both ends of the sense RNA oligonucleotide.
[0254] Embodiment 130. The RNAi compound of embodiment 129, wherein the compound comprises one abasic sugar moiety attached to one or both ends of the sense RNA oligonucleotide
[0255] Embodiment 131. The RNAi compound of embodiment 129 or 130, wherein each abasic sugar moiety is inverted.
[0256] Embodiment 132. The RNAi compound of any of embodiments 129-131, wherein the abasic sugar moieties are attached to the sense RNA oligonucleotide through a phosphorothioate linkage.
[0257] Embodiment 133. The RNAi compound of any of embodiments 48-132, wherein the RNAi compound is a prodrug.
[0258] Embodiment 134. The RNAi compound of any of embodiments 48-132, wherein the compound comprises a conjugate group.
[0259] Embodiment 135. The RNAi compound of embodiment 134, wherein the conjugate group is conjugated to the antisense RNAi oligonucleotide.
[0260] Embodiment 136. The RNAi compound of embodiment 135, wherein the conjugate group is conjugated to the 5′-end of the antisense RNAi oligonucleotide.
[0261] Embodiment 137. The RNAi compound of embodiment 135, wherein the conjugate group is conjugated to the 3′-end of the antisense RNAi oligonucleotide.
[0262] Embodiment 138. The RNAi compound of embodiment 134, wherein the conjugate group is conjugated to the sense RNAi oligonucleotide.
[0263] Embodiment 139. The RNAi compound of embodiment 138, wherein the conjugate group is conjugated to the 5′-end of the sense RNAi oligonucleotide.
[0264] Embodiment 140. The RNAi compound of embodiment 138, wherein the conjugate group is conjugated to the 3′-end of the sense RNAi oligonucleotide.
[0265] Embodiment 141. The RNAi compound of any of embodiments 138-140, wherein the conjugate group is attached directly to the sense RNAi oligonucleotide.
[0266] Embodiment 142. The RNAi compound of any of embodiments 138-141, wherein the conjugate group is attached to the sense RNAi oligonucleotide through 1-5 abasic sugar moieties.
[0267] Embodiment 143. The RNAi compound of embodiment 142, wherein the 1-5 abasic sugar moieties are inverted.
[0268] Embodiment 144. The RNAi compound of any of embodiments 134-143, wherein the conjugate group comprises a pyrrolidine linker.
[0269] Embodiment 145. The RNAi compound of any of embodiments 134-144, wherein the conjugate group comprises a cell targeting moiety.
[0270] Embodiment 146. The RNAi compound of embodiment 145, wherein the cell targeting moiety is a neurotransmitter receptor ligand.
[0271] Embodiment 147. The RNAi compound of embodiment 146, wherein the targeting ligand targets a GABA transporter.
[0272] Embodiment 148. A pharmaceutical composition comprising the RNAi compound of any of embodiments 48-147 and a pharmaceutically acceptable carrier or diluent.
[0273] Embodiment 149. The pharmaceutical composition of embodiment 148, wherein the pharmaceutically acceptable diluent is artificial cerebral spinal fluid, sterile saline, or PBS.
[0274] Embodiment 150. The pharmaceutical composition of embodiment 149, wherein the pharmaceutical composition consists essentially of the RNAi compound and sterile saline.
[0275] Embodiment 151. The pharmaceutical composition of embodiment 148 or 149 comprising a lipid.
[0276] Embodiment 152. The pharmaceutical composition of embodiment 151 comprising a lipid nanoparticle.
[0277] Embodiment 153. A method comprising administering to an animal a pharmaceutical composition of any of embodiments 148-152.
[0278] Embodiment 154. A method of treating a disease associated with APP comprising administering to an individual having or at risk for developing a disease associated with APP a therapeutically effective amount of a pharmaceutical composition according to any of embodiments 148-152; and thereby treating the disease associated with APP.
[0279] Embodiment 155. The method of embodiment 154, wherein the APP-associated disease is Alzheimer's Disease, Alzheimer's Disease in a Down Syndrome patient, or Cerebral Amyloid Angiopathy.
[0280] Embodiment 156. The method of embodiment 155, wherein at least one symptom or hallmark of the APP-associated disease is ameliorated.
[0281] Embodiment 157. The method of embodiment 156, wherein the symptom or hallmark is cognitive impairment, including a decline in memory and language skills, behavioral and psychological symptoms such as apathy and lack of motivation, gait disturbances and seizures, progressive dementia, and/or abnormal amyloid deposits.
[0282] Embodiment 158. An oligomeric compound comprising a modified oligonucleotide consisting of 12 to 30 linked nucleosides wherein the nucleobase sequence of the modified oligonucleotide is at least 80% complementary to an equal length portion of an APP RNA, and wherein the modified oligonucleotide comprises at least one modification selected from a modified sugar, a sugar surrogate, and a modified internucleoside linkage.
[0283] Embodiment 159. An oligomeric compound comprising a modified oligonucleotide consisting of 12 to 30 linked nucleosides wherein the nucleobase sequence of the modified oligonucleotide comprises at least 12, 13, 14, 15, 16, 17, or 18 nucleobases of any of SEQ ID NOS: 12-501; wherein the modified oligonucleotide comprises at least one modification selected from a modified sugar and a modified internucleoside linkage.
[0284] Embodiment 160. An oligomeric compound comprising a modified oligonucleotide consisting of 12 to 30 linked nucleosides wherein the nucleobase sequence of the modified oligonucleotide comprises at least 12, 13, 14, 15, 16, 17, 18, 19, or 20 nucleobases of any of SEQ ID NOS: 502-516; wherein the modified oligonucleotide comprises at least one modification selected from a modified sugar and a modified internucleoside linkage.
[0285] Embodiment 161. An oligomeric compound comprising a modified oligonucleotide consisting of 12 to 30 linked nucleosides wherein the nucleobase sequence of the modified oligonucleotide comprises at least 12, 13, 14, 15, 16, 17, 18, 19, 20, 21, 22, or 23 nucleobases of any of SEQ ID NOS: 517-665, 815-840 or 867-888; wherein the modified oligonucleotide comprises at least one modification selected from a modified sugar and a modified internucleoside linkage.
[0286] Embodiment 162. An oligomeric compound comprising a modified oligonucleotide consisting of 12 to 30 linked nucleosides wherein the nucleobase sequence of the modified oligonucleotide is complementary to at least 8, at least 9, at least 10, at least 11, at least 12, at least 13, at least 14, at least 15, at least 16, at least 17, at least 18, at least 19, at least 20, or at least 21 contiguous nucleobases of:
   [0287] an equal length portion of nucleobases 40-78 of SEQ ID NO: 1;
   [0288] an equal length portion of nucleobases 69-146 of SEQ ID NO: 1;
   [0289] an equal length portion of nucleobases 83-129 of SEQ ID NO: 1;
   [0290] an equal length portion of nucleobases 83-246 of SEQ ID NO: 1;
   [0291] an equal length portion of nucleobases 94-225 of SEQ ID NO: 1;
   [0292] an equal length portion of nucleobases 194-231 of SEQ ID NO: 1;
   [0293] an equal length portion of nucleobases 194-238 of SEQ ID NO: 1;
   [0294] an equal length portion of nucleobases 236-268 of SEQ ID NO: 1;
   [0295] an equal length portion of nucleobases 258-288 of SEQ ID NO: 1;
   [0296] an equal length portion of nucleobases 285-311 of SEQ ID NO: 1;
   [0297] an equal length portion of nucleobases 296-321 of SEQ ID NO: 1;
   [0298] an equal length portion of nucleobases 307-330 of SEQ ID NO: 1;
   [0299] an equal length portion of nucleobases 329-352 of SEQ ID NO: 1;
   [0300] an equal length portion of nucleobases 330-352 of SEQ ID NO: 1;
   [0301] an equal length portion of nucleobases 339-383 of SEQ ID NO: 1;
   [0302] an equal length portion of nucleobases 415-439 of SEQ ID NO: 1;
   [0303] an equal length portion of nucleobases 413-477 of SEQ ID NO: 1;
   [0304] an equal length portion of nucleobases 415-477 of SEQ ID NO: 1;
   [0305] an equal length portion of nucleobases 477-506 of SEQ ID NO: 1;
   [0306] an equal length portion of nucleobases 477-523 of SEQ ID NO: 1;
   [0307] an equal length portion of nucleobases 477-541 of SEQ ID NO: 1;
   [0308] an equal length portion of nucleobases 530-557 of SEQ ID NO: 1;
   [0309] an equal length portion of nucleobases 581-638 of SEQ ID NO: 1;
   [0310] an equal length portion of nucleobases 636-661 of SEQ ID NO: 1;
   [0311] an equal length portion of nucleobases 652-697 of SEQ ID NO: 1;
   [0312] an equal length portion of nucleobases 728-821 of SEQ ID NO: 1;
   [0313] an equal length portion of nucleobases 770-821 of SEQ ID NO: 1;
   [0314] an equal length portion of nucleobases 920-950 of SEQ ID NO: 1;
   [0315] an equal length portion of nucleobases 1006-1049 of SEQ ID NO: 1;
   [0316] an equal length portion of nucleobases 1152-1179 of SEQ ID NO: 1;
   [0317] an equal length portion of nucleobases 1227-1265 of SEQ ID NO: 1;
   [0318] an equal length portion of nucleobases 1227-1274 of SEQ ID NO: 1;
   [0319] an equal length portion of nucleobases 1268-1332 of SEQ ID NO: 1;
   [0320] an equal length portion of nucleobases 1268-1311 of SEQ ID NO: 1;
   [0321] an equal length portion of nucleobases 1289-1332 of SEQ ID NO: 1;
   [0322] an equal length portion of nucleobases 1518-1543 of SEQ ID NO: 1;
   [0323] an equal length portion of nucleobases 1531-1593 of SEQ ID NO: 1;
   [0324] an equal length portion of nucleobases 1544-1593 of SEQ ID NO: 1;
   [0325] an equal length portion of nucleobases 1634-1657 of SEQ ID NO: 1;
   [0326] an equal length portion of nucleobases 1778-1800 of SEQ ID NO: 1;
   [0327] an equal length portion of nucleobases 1882-1908 of SEQ ID NO: 1;
   [0328] an equal length portion of nucleobases 2051-2074 of SEQ ID NO: 1;
   [0329] an equal length portion of nucleobases 2360-3117 of SEQ ID NO: 1;
   [0330] an equal length portion of nucleobases 2402-3117 of SEQ ID NO: 1;
   [0331] an equal length portion of nucleobases 2360-2655 of SEQ ID NO: 1;
   [0332] an equal length portion of nucleobases 2402-2655 of SEQ ID NO: 1;
   [0333] an equal length portion of nucleobases 2675-3054 of SEQ ID NO: 1; or
   [0334] an equal length portion of nucleobases 3192-3277 of SEQ ID NO: 3; wherein the modified oligonucleotide comprises at least one modification selected from a modified sugar and a modified internucleoside linkage.
[0335] Embodiment 163. The oligomeric compound of any of embodiments 158-162, wherein the modified oligonucleotide has a nucleobase sequence that is at least 80%, 85%, 90%, 95%, or 100% complementary to any of the nucleobase sequences of SEQ ID NO: 1-7 when measured across the entire nucleobase sequence of the modified oligonucleotide.
[0336] Embodiment 164. The oligomeric compound of any of embodiments 158-162, wherein at least one nucleoside of the modified oligonucleotide is a modified nucleoside.
[0337] Embodiment 165. The oligomeric compound of embodiment 164, wherein at least one modified nucleoside of the modified oligonucleotide comprises a modified sugar moiety.
[0338] Embodiment 166. The oligomeric compound of embodiment 165, wherein at least one modified nucleoside of the modified oligonucleotide comprises a bicyclic sugar moiety.
[0339] Embodiment 167. The oligomeric compound of embodiment 166, wherein at least one modified nucleoside of the modified oligonucleotide comprises a bicyclic sugar moiety having a 2′-4′ bridge, wherein the 2′-4′ bridge is selected from —O—CH₂—; and —O—CH(CH₃)—.
[0340] Embodiment 168. The oligomeric compound of any of embodiments 162-167, wherein at least one modified nucleoside of the modified oligonucleotide comprises a non-bicyclic modified sugar moiety.
[0341] Embodiment 169. The oligomeric compound of embodiment 168, wherein at least one modified nucleoside of the modified oligonucleotide comprises a bicyclic sugar moiety having a 2′-4′ bridge and at least one nucleoside of the modified oligonucleotide comprises a non-bicyclic modified sugar moiety.
[0342] Embodiment 170. The oligomeric compound of embodiment 168 or 169, wherein the non-bicyclic modified sugar moiety is a 2′-MOE modified sugar moiety, a 2′-OMe modified sugar moiety, or a 2′-F modified sugar moiety.
[0343] Embodiment 171. The oligomeric compound of any of embodiments 158-170, wherein tat least one modified nucleoside of the modified oligonucleotide comprises a sugar surrogate.
[0344] Embodiment 172. The oligomeric compound of embodiment 171, wherein the modified oligonucleotide comprises at least one modified nucleoside comprising a sugar surrogate selected from morpholino and PNA.
[0345] Embodiment 173. The oligomeric compound of any of embodiments 158-172, wherein the modified oligonucleotide comprises at least one modified internucleoside linkage.
[0346] Embodiment 174. The oligomeric compound of embodiment 173, wherein each internucleoside linkage of the modified oligonucleotide is a modified internucleoside linkage.
[0347] Embodiment 175. The oligomeric compound of embodiment 173 or 174, wherein at least one internucleoside linkage is a phosphorothioate internucleoside linkage.
[0348] Embodiment 176. The oligomeric compound of embodiment 173 or 175, wherein the modified oligonucleotide comprises at least one phosphodiester internucleoside linkage.
[0349] Embodiment 177. The oligomeric compound of any of embodiments 173, 175, or 176, wherein each internucleoside linkage is independently selected from a phosphodiester internucleoside linkage or a phosphorothioate internucleoside linkage.
[0350] Embodiment 178. The oligomeric compound of any of embodiments 158-177, wherein the modified oligonucleotide comprises a modified nucleobase.
[0351] Embodiment 179. The oligomeric compound of embodiment 178, wherein the modified nucleobase is a 5-methyl cytosine.
[0352] Embodiment 180. The oligomeric compound of any of embodiments 158-179 wherein the modified oligonucleotide consists of 12-22, 12-20, 14-18, 14-20, 15-17, 15-25, 16-20, 16-18, 18-22, 18-25, 18-20, 20-25, or 21-23 linked nucleosides.
[0353] Embodiment 181. The oligomeric compound of any of embodiments 158-180, wherein the modified oligonucleotide consists of 18 linked nucleosides.
[0354] Embodiment 182. The oligomeric compound of any of embodiments 158-180, wherein the modified oligonucleotide consists of 20 linked nucleosides.
[0355] Embodiment 183. The oligomeric compound of any of embodiments 158-180, wherein the modified oligonucleotide consists of 21 linked nucleosides.
[0356] Embodiment 184. The oligomeric compound of any of embodiments 158-180, wherein the modified oligonucleotide consists of 23 linked nucleosides.
[0357] Embodiment 185. The oligomeric compound of any of embodiments 158-184, wherein the oligomeric compound is an RNase H compound.
[0358] Embodiment 186. The oligomeric compound of embodiment 185, wherein the modified oligonucleotide is a gapmer.
[0359] Embodiment 187. The oligomeric compound of any of claims 158-186, wherein the modified oligonucleotide has a sugar motif comprising:
   [0360] a 5′-region consisting of 1-6 linked 5′-region nucleosides;
   [0361] a central region consisting of 6-10 linked central region nucleosides; and
   [0362] a 3′-region consisting of 1-6 linked 3′-region nucleosides;
   [0363] wherein the 3′-most nucleoside of the 5′-region and the 5′-most nucleoside of the 3′-region comprise modified sugar moieties, and
   [0364] each of the central region nucleosides is selected from a nucleoside comprising a 2′-β-D-deoxyribosyl sugar moiety and a nucleoside comprising a 2′-substituted sugar moiety, wherein the central region comprises at least six nucleosides comprising a 2′-β-D-deoxyribosyl sugar moiety and no more than two nucleosides comprising a 2′-substituted sugar moiety.
[0365] Embodiment 188. The oligomeric compound of any of embodiments 158-183 or 185-187, wherein the modified oligonucleotide has a sugar motif comprising:
   [0366] a 5′-region consisting of 1-6 linked 5′-region nucleosides;
   [0367] a central region consisting of 6-10 linked central region nucleosides; and
   [0368] a 3′-region consisting of 1-6 linked 3′-region nucleosides; wherein
   [0369] each of the 5′-region nucleosides and each of the 3′-region nucleosides comprises a modified sugar moiety and each of the central region nucleosides comprises a 2′-β-D-deoxyribosyl sugar moiety.
[0370] Embodiment 189. The oligomeric compound of embodiment 188, wherein the modified oligonucleotide has a sugar motif comprising:
   [0371] a 5′-region consisting of 5 linked 5′-region nucleosides;
   [0372] a central region consisting of 10 linked central region nucleosides; and
   [0373] a 3′-region consisting of 5 linked 3′-region nucleosides; wherein
   [0374] each of the 5′-region nucleosides and each of the 3′-region nucleosides comprises either a cEt modified sugar moiety or a 2′-MOE modified sugar moiety, and each of the central region nucleosides comprises a 2′-β-D-deoxyribosyl sugar moiety.
[0375] Embodiment 190. The oligomeric compound of any of embodiments 158-184, wherein the oligomeric compound is an RNAi compound.
[0376] Embodiment 191. The oligomeric compound of any of embodiments 158-190, wherein the oligomeric compound comprises an antisense RNAi oligonucleotide comprising a targeting region comprising at least 15 contiguous nucleobases, wherein the targeting region is at least 90% complementary to an equal-length portion of an APP RNA.
[0377] Embodiment 192. The oligomeric compound of embodiment 191, wherein the targeting region of the antisense RNAi oligonucleotide is at least 95% complementary or is 100% complementary to the equal length portion of an APP RNA.
[0378] Embodiment 193. The oligomeric compound of any of embodiments 191-192, wherein the targeting region of the antisense RNAi oligonucleotide comprises at least 19, 20, 21, or 25 contiguous nucleobases.
[0379] Embodiment 194. The oligomeric compound of any of embodiments 191-193, wherein the APP RNA has the nucleobase sequence of any of SEQ ID NOs: 1-7.
[0380] Embodiment 195. The oligomeric compound of any of embodiments 191-194 wherein at least one nucleoside of the antisense RNAi oligonucleotide comprises a modified sugar moiety selected from: 2′-F, 2′-OMe, 2′-NMA, LNA, and cEt; or a sugar surrogate selected from GNA, and UNA.
[0381] Embodiment 196. The oligomeric compound of any of embodiments 191-195, wherein each nucleoside of the antisense RNAi oligonucleotide comprises a modified sugar moiety or a sugar surrogate.
[0382] Embodiment 197. The oligomeric compound of any of embodiments 191-196 wherein at least 80%, at least 90%, or 100% of the nucleosides of the antisense RNAi oligonucleotide comprises a modified sugar moiety selected from 2′-F and 2′-OMe.
[0383] Embodiment 198. The oligomeric compound of any of embodiments 191-197, comprising a stabilized phosphate group attached to the 5′ position of the 5′-most nucleoside of the antisense RNAi oligonucleotide.
[0384] Embodiment 199. The oligomeric compound of embodiment 198, wherein the stabilized phosphate group comprises a cyclopropyl phosphonate or an (E)-vinyl phosphonate.
[0385] Embodiment 200. The oligomeric compound of any of embodiments 158-199, wherein the oligomeric compound is a single-stranded oligomeric compound.
[0386] Embodiment 201. The oligomeric compound of any of embodiments 158-200, consisting of the modified oligonucleotide or the RNAi antisense oligonucleotide.
[0387] Embodiment 202. The oligomeric compound of any of embodiments 158-200 comprising a conjugate group comprising a conjugate moiety and a conjugate linker.
[0388] Embodiment 203. The oligomeric compound of embodiment 202, wherein the conjugate linker consists of a single bond.
[0389] Embodiment 204. The oligomeric compound of embodiment 202, wherein the conjugate linker is cleavable.
[0390] Embodiment 205. The oligomeric compound of embodiment 202, wherein the conjugate linker comprises 1-3 linker-nucleosides.
[0391] Embodiment 206. The oligomeric compound of any of embodiments 202-205, wherein the conjugate group is attached to the 5′-end of the modified oligonucleotide or the antisense RNAi oligonucleotide.
[0392] Embodiment 207. The oligomeric compound of any of embodiments 202-205 wherein the conjugate group is attached to the 3′-end of the modified oligonucleotide or the antisense RNAi oligonucleotide.
[0393] Embodiment 208. The oligomeric compound of any of embodiments 158-200 or 202-206, comprising a terminal group.
[0394] Embodiment 209. The oligomeric compound of any of embodiments 158-204 or 206-208, wherein the oligomeric compound does not comprise linker-nucleosides.
[0395] Embodiment 210. An oligomeric duplex, comprising a first oligomeric compound comprising an antisense RNAi oligonucleotide of any of embodiments 188-209 and a second oligomeric compound comprising a sense RNAi oligonucleotide consisting of 17 to 30 linked nucleosides, wherein the nucleobase sequence of the sense RNAi oligonucleotide comprises an antisense-hybridizing region comprising least 15 contiguous nucleobases wherein the antisense-hybridizing region is at least 90% complementary to an equal length portion of the antisense RNAi oligonucleotide.
[0396] Embodiment 211. The oligomeric duplex of embodiment 210, wherein the sense RNAi oligonucleotide consists of 18-25, 20-25, or 21-23 linked nucleosides.
[0397] Embodiment 212. The oligomeric duplex of embodiment 211, wherein the sense RNAi oligonucleotide consists of 21 or 23 linked nucleosides.
[0398] Embodiment 213. The oligomeric duplex of any of embodiments 210-212, wherein 1-4 3′-most nucleosides of the antisense or the sense RNAi oligonucleotide are overhanging nucleosides.
[0399] Embodiment 214. The oligomeric duplex of any of embodiments 210-213, wherein 1-4 5′-most nucleosides of the antisense or sense RNAi oligonucleotide are overhanging nucleosides.
[0400] Embodiment 215. The oligomeric duplex of any of embodiments 210-214, wherein the duplex is blunt ended at the 3′-end of the antisense RNAi oligonucleotide.
[0401] Embodiment 216. The oligomeric duplex of any of embodiments 210-214, wherein the duplex is blunt ended at the 5′-end of the antisense RNAi oligonucleotide.
[0402] Embodiment 217. The oligomeric duplex of any of embodiments 210-216, wherein at least one nucleoside of the sense RNAi oligonucleotide comprises a modified sugar moiety selected from: 2′-F, 2′-OMe, LNA, cEt, or a sugar surrogate selected from GNA, and UNA.
[0403] Embodiment 218. The oligomeric duplex of embodiment 217, wherein each nucleoside of the sense RNAi oligonucleotide comprises a modified sugar moiety or a sugar surrogate.
[0404] Embodiment 219. The oligomeric duplex of embodiment 218, wherein at least 80%, at least 90%, or 100% of the nucleosides of the sense RNAi oligonucleotide comprises a modified sugar moiety selected from 2′-F and 2′-OMe.
[0405] Embodiment 220. The oligomeric duplex of any of embodiments 210-219, wherein at least one nucleoside of the sense RNAi oligonucleotide comprises a modified nucleobase.
[0406] Embodiment 221. The oligomeric duplex of any of embodiments 210-220, wherein at least one internucleoside linkage of the sense RNAi oligonucleotide is a modified internucleoside linkage.
[0407] Embodiment 222. The oligomeric duplex of embodiment 221, wherein at least one internucleoside linkage of the sense RNAi oligonucleotide is a phosphorothioate internucleoside linkage.
[0408] Embodiment 223. The oligomeric duplex of any of embodiments 210-222, wherein the compound comprises 1-5 abasic sugar moieties attached to one or both ends of the antisense or sense RNA oligonucleotide.
[0409] Embodiment 224. The oligomeric duplex of any of embodiments 210-223, consisting of the antisense RNAi oligonucleotide and the sense RNAi oligonucleotide.
[0410] Embodiment 225. The oligomeric duplex of embodiment 210, wherein the second oligomeric compound comprises a conjugate group comprising a conjugate moiety and a conjugate linker.
[0411] Embodiment 226. The oligomeric duplex of embodiment 225, wherein the conjugate linker consists of a single bond.
[0412] Embodiment 227. The oligomeric duplex of embodiment 225, wherein the conjugate linker is cleavable.
[0413] Embodiment 228. The oligomeric duplex of embodiment 225, wherein the conjugate linker comprises 1-3 linker-nucleosides.
[0414] Embodiment 229. The oligomeric duplex of any of embodiments 225-228, wherein the conjugate group is attached to the 5′-end of the sense RNAi oligonucleotide.
[0415] Embodiment 230. The oligomeric compound of any of embodiments 225-225 wherein the conjugate group is attached to the 3′-end of the sense RNAi oligonucleotide.
[0416] Embodiment 231. The oligomeric compound of any of embodiments 225-225 wherein the conjugate group is attached via the 2′ position of a ribosyl sugar moiety at an internal position within the sense RNAi oligonucleotide.
[0417] Embodiment 232. The oligomeric compound of any of embodiments 202-207 or the oligomeric duplex of any of embodiments 225-231, wherein at least one conjugate group comprises a C₁₆ alkyl group.
[0418] Embodiment 233. The oligomeric duplex of embodiment 210, wherein the second oligomeric compound comprises a terminal group.
[0419] Embodiment 234. A pharmaceutical composition comprising an oligomeric compound of any of embodiments 158-209 or an oligomeric duplex of embodiments 210-233 and a pharmaceutically acceptable carrier or diluent.
[0420] Embodiment 235. The pharmaceutical composition of embodiment 234, wherein the pharmaceutically acceptable diluent is artificial cerebral spinal fluid, sterile saline, or PBS.
[0421] Embodiment 236. The pharmaceutical composition of embodiment 234, wherein the pharmaceutical composition consists essentially of the modified oligonucleotide and sterile saline.
[0422] Embodiment 237. A method comprising administering to an animal a pharmaceutical composition of any of embodiments 234-236.
[0423] Embodiment 238. A method of treating a disease associated with APP comprising administering to an individual having or at risk for developing a disease associated with APP a therapeutically effective amount of a pharmaceutical composition according to any of embodiments 234-236; and thereby treating the disease associated with APP.
[0424] Embodiment 239. The method of embodiment 238, wherein the APP-associated disease is Alzheimer's Disease, Alzheimer's Disease in a Down Syndrome patient, or Cerebral Amyloid Angiopathy.
[0425] Embodiment 240. The method of any of embodiments 238-239 wherein at least one symptom or hallmark of the APP-associated disease is ameliorated.
[0426] Embodiment 241. The method of embodiment 240, wherein the symptom or hallmark is cognitive impairment, including a decline in memory and language skills, behavioral and psychological symptoms such as apathy and lack of motivation, gait disturbances and seizures, progressive dementia, and/or abnormal amyloid deposits.

[0427] I. Certain Oligonucleotides

[0428] In certain embodiments, provided herein are oligomeric compounds comprising oligonucleotides, which consist of linked nucleosides. Oligonucleotides may be unmodified oligonucleotides (RNA or DNA) or may be modified oligonucleotides. Modified oligonucleotides comprise at least one modification relative to unmodified RNA or DNA. That is, modified oligonucleotides comprise at least one modified nucleoside (comprising a modified sugar moiety and/or a modified nucleobase) and/or at least one modified internucleoside linkage. In certain embodiments, provided herein are RNAi compounds comprising antisense RNAi oligonucleotides complementary to APP and optionally sense RNAi oligonucleotides complementary to the antisense RNAi oligonucleotides. Antisense RNAi oligonucleotides and sense RNAi oligonucleotides typically comprise at least one modified nucleoside and/or at least one modified internucleoside linkage. Certain modified nucleosides and modified internucleoside linkages suitable for use in modified oligonucleotides are described below.

[0429] A. Certain Modified Nucleosides

[0430] Modified nucleosides comprise a modified sugar moiety or a modified nucleobase or both a modified sugar moiety and a modified nucleobase. In certain embodiments, modified nucleosides comprising the following modified sugar moieties and/or the following modified nucleobases may be incorporated into antisense RNAi oligonucleotides and/or sense RNAi oligonucleotides.

[0431] 1. Certain Sugar Moieties

[0432] In certain embodiments, modified sugar moieties are non-bicyclic modified sugar moieties. In certain embodiments, modified sugar moieties are bicyclic or tricyclic sugar moieties. In certain embodiments, modified sugar moieties are sugar surrogates. Such sugar surrogates may comprise one or more substitutions corresponding to those of other types of modified sugar moieties.

[0433] In certain embodiments, modified sugar moieties are non-bicyclic modified sugar moieties comprising a furanosyl ring with one or more substituent groups none of which bridges two atoms of the furanosyl ring to form a bicyclic structure. Such non bridging substituents may be at any position of the furanosyl, including but not limited to substituents at the 2′, 3′, 4′, and/or 5′ positions. In certain embodiments one or more non-bridging substituent of non-bicyclic modified sugar moieties is branched. Examples of 2′-substituent groups suitable for non-bicyclic modified sugar moieties include but are not limited to: 2′-F, 2′-OCH₃(“OMe” or “O-methyl”), and 2′-O(CH₂)₂OCH₃ (“MOE”). In certain embodiments, 2′-substituent groups are selected from among: halo, allyl, amino, azido, SH, CN, OCN, CF₃, OCF₃, O—C₁-C₁₀ alkoxy, O—C₁-C₁₀ substituted alkoxy, O—C₁-C₁₀ alkyl, O—C₁-C₁₀ substituted alkyl, S-alkyl, N(Rₘ)-alkyl, O-alkenyl, S-alkenyl, N(Rₘ)-alkenyl, O-alkynyl, S-alkynyl, N(Rₘ)-alkynyl, O-alkylenyl-O-alkyl, alkynyl, alkaryl, aralkyl, O-alkaryl, O-aralkyl, O(CH₂)₂SCH₃, O(CH₂)₂ON(Rₘ)(Rₙ) or OCH₂C(═O)—N(Rₘ)(Rₙ), where each Rₘ and Rₙ is, independently, H, an amino protecting group, or substituted or unsubstituted C₁-C₁₀ alkyl, —O(CH₂)₂ON(CH₃)₂ (“DMAOE”), 2′-OCH₂OCH₂N(CH₂)₂ (“DMAEOE”), and the 2′-substituent groups described in Cook et al., U.S. Pat. No. 6,531,584; Cook et al., U.S. Pat. No. 5,859,221; and Cook et al., U.S. Pat. No. 6,005,087. Certain embodiments of these 2′-substituent groups can be further substituted with one or more substituent groups independently selected from among: hydroxyl, amino, alkoxy, carboxy, benzyl, phenyl, nitro (NO₂), thiol, thioalkoxy, thioalkyl, halogen, alkyl, aryl, alkenyl and alkynyl. In certain embodiments, non-bicyclic modified sugar moieties comprise a substituent group at the 3′-position. Examples of substituent groups suitable for the 3′-position of modified sugar moieties include but are not limited to alkoxy (e.g., methoxy), alkyl (e.g., methyl, ethyl). In certain embodiments, non-bicyclic modified sugar moieties comprise a substituent group at the 4′-position. Examples of 4′-substituent groups suitable for non-bicyclic modified sugar moieties include but are not limited to alkoxy (e.g., methoxy), alkyl, and those described in Manoharan et al., WO 2015/106128. Examples of 5′-substituent groups suitable for non-bicyclic modified sugar moieties include but are not limited to: 5′-methyl (R or S), 5′-vinyl, ethyl, and 5′-methoxy. In certain embodiments, non-bicyclic modified sugar moieties comprise more than one non-bridging sugar substituent, for example, 2′-F-5′-methyl sugar moieties and the modified sugar moieties and modified nucleosides described in Migawa et al., WO 2008/101157 and Rajeev et al., US2013/0203836).

[0434] In certain embodiments, a 2′-substituted non-bicyclic modified nucleoside comprises a sugar moiety comprising a non-bridging 2′-substituent group selected from: F, NH₂, N3, OCF₃, OCH₃, O(CH₂)₃NH₂, CH₂CH═CH₂, OCH₂CH═CH₂, OCH₂CH₂OCH₃, O(CH₂)₂SCH₃, O(CH₂)₂ON(Rₘ)(Rₙ), O(CH₂)₂O(CH₂)₂N(CH₃)₂, and N-substituted acetamide (OCH₂C(═O)—N(Rₘ)(124)), where each Rₘ and Rₙ is, independently, H, an amino protecting group, or substituted or unsubstituted C₁-C₁₀ alkyl.

[0435] In certain embodiments, a 2′-substituted nucleoside non-bicyclic modified nucleoside comprises a sugar moiety comprising a non-bridging 2′-substituent group selected from: F, OCF₃, OCH₃, OCH₂CH₂OCH₃, O(CH₂)₂SCH₃, O(CH₂)₂ON(CH₃)2, O(CH₂)₂O(CH₂)₂N(CH₃)2, O(CH₂)₂ON(CH₃)2 (“DMAOE”), OCH₂OCH₂N(CH₂)₂ (“DMAEOE”) and OCH₂C(═O)—N(H)CH₃ (“NMA”).

[0436] In certain embodiments, a 2′-substituted non-bicyclic modified nucleoside comprises a sugar moiety comprising a non-bridging 2′-substituent group selected from: F, OCH₃, and OCH₂CH₂OCH₃.

[0437] In naturally occurring nucleic acids, sugars are linked to one another 3′ to 5′. In certain embodiments, oligonucleotides include one or more nucleoside or sugar moiety linked at an alternative position, for example at the 2′ or inverted 5′ to 3′. For example, where the linkage is at the 2′ position, the 2′-substituent groups may instead be at the 3′-position.

[0438] Certain modified sugar moieties comprise a substituent that bridges two atoms of the furanosyl ring to form a second ring, resulting in a bicyclic sugar moiety. Nucleosides comprising such bicyclic sugar moieties have been referred to as bicyclic nucleosides (BNAs), locked nucleosides, or conformationally restricted nucleotides (CRN). Certain such compounds are described in US Patent Publication No. 2013/0190383; and PCT publication WO 2013/036868. In certain such embodiments, the bicyclic sugar moiety comprises a bridge between the 4′ and the 2′ furanose ring atoms. n certain such embodiments, the furanose ring is a ribose ring. Examples of such 4′ to 2′ bridging sugar substituents include but are not limited to: 4′-CH₂-2′, 4′-(CH₂)₂-2′, 4′-(CH₂)₃-2′, 4′-CH₂—O-2′ (“LNA”), 4′-CH₂—S-2′, 4′- (CH₂)₂—O-2′ (“ENA”), 4′-CH(CH₃)—O-2′ (referred to as “constrained ethyl” or “cEt” when in the S configuration), 4′-CH₂—O—CH₂-2′, 4′-CH₂—N(R)-2′, 4′-CH(CH₂OCH₃)—O-2′ (“constrained MOE” or “cMOE”) and analogs thereof (see, e.g., Seth et al., U.S. Pat. No. 7,399,845, Bhat et al., U.S. Pat. No. 7,569,686, Swayze et al., U.S. Pat. No. 7,741,457, and Swayze et al., U.S. Pat. No. 8,022,193), 4′-C(CH₃)(CH₃)—O-2′ and analogs thereof (see, e.g., Seth et al., U.S. Pat. No. 8,278,283), 4′-CH₂—N(OCH₃)-2′ and analogs thereof (see, e.g., Prakash et al., U.S. Pat. No. 8,278,425), 4′-CH₂—O—N(CH₃)-2′ (see, e.g., Allerson et al., U.S. Pat. No. 7,696,345 and Allerson et al., U.S. Pat. No. 8,124,745), 4′-CH₂—C(H)(CH₃)-2′ (see, e.g., Zhou, et al., J. Org. Chem., 2009, 74, 118-134), 4′-CH₂—C(═CH₂)-2′ and analogs thereof (see e.g., Seth et al., U.S. Pat. No. 8,278,426), 4′-C(RₐR_{b})—N(R)—O-2′, 4′-C(RₐR_{b})—O—N(R)-2′, 4′-CH₂—O—N(R)-2′, and 4′-CH₂—N(R)—O-2′, wherein each R, Rₐ, and R_{b} is, independently, H, a protecting group, or C₁-C₁₂ alkyl (see, e.g. Imanishi et al., U.S. Pat. No. 7,427,672).

[0439] In certain embodiments, such 4′ to 2′ bridges independently comprise from 1 to 4 linked groups independently selected from: —[C(Ra)(Rb)]n-, —[C(Ra)(Rb)]n-O—, C(Ra)═C(Rb)-, C(Ra)═N—, C(═NRa)-, —C(═O)—, —C(═S)—, —O—, —Si(Ra)2-, —S(═O)x-, and N(Ra)-;

[0440] wherein:

[0441] x is 0, 1, or 2;

[0442] n is 1, 2, 3, or 4;

[0443] each Ra and Rb is, independently, H, a protecting group, hydroxyl, C1-C12 alkyl, substituted C1-C12 alkyl, C2-C12 alkenyl, substituted C2-C12 alkenyl, C2-C12 alkynyl, substituted C2-C12 alkynyl, C5-C20 aryl, substituted C5-C20 aryl, heterocycle radical, substituted heterocycle radical, heteroaryl, substituted heteroaryl, C5-C7 alicyclic radical, substituted C5-C7 alicyclic radical, halogen, OJ1, NJ1J2, SJ1, N3, COOJ1 acyl (C(═O)—H), substituted acyl, CN, sulfonyl (S(═O)2-J1), or sulfoxyl (S(═O)-J1); and each J1 and J2 is, independently, H, C1-C12 alkyl, substituted C1-C12 alkyl, C2-C12 alkenyl, substituted C2-C12 alkenyl, C2-C12 alkynyl, substituted C2-C12 alkynyl, C5-C20 aryl, substituted C5-C20 aryl, acyl (C(═O)—H), substituted acyl, a heterocycle radical, a substituted heterocycle radical, C1-C12 aminoalkyl, substituted C1-C12 aminoalkyl, or a protecting group.

[0444] Additional bicyclic sugar moieties are known in the art, see, for example: Freier et al., Nucleic Acids Research, 1997, 25(22), 4429-4443, Albaek et al., J. Org. Chem., 2006, 71, 7731-7740, Singh et al., Chem. Commun., 1998, 4, 455-456; Koshkin et al., Tetrahedron, 1998, 54, 3607-3630; Wahlestedt et al., Proc. Natl. Acad. Sci. U.S.A, 2000, 97, 5633-5638; Kumar et al., Bioorg. Med. Chem. Lett., 1998, 8, 2219-2222; Singh et al., J. Org. Chem., 1998, 63, 10035-10039; Srivastava et al., J. Am. Chem. Soc., 2007, 129, 8362-8379; Elayadi et al., Curr. Opinion Invens. Drugs, 2001, 2, 558-561; Braasch et al., Chem. Biol., 2001, 8, 1-7; Orum et al., Curr. Opinion Mol. Ther., 2001, 3, 239-243; Wengel et al., U.S. Pat. No. 7,053,207, Imanishi et al., U.S. Pat. No. 6,268,490, Imanishi et al. U.S. Pat. No. 6,770,748, Imanishi et al., U.S. RE44,779; Wengel et al., U.S. Pat. No. 6,794,499, Wengel et al., U.S. Pat. No. 6,670,461; Wengel et al., U.S. Pat. No. 7,034,133, Wengel et al., U.S. Pat. No. 8,080,644; Wengel et al., U.S. Pat. No. 8,034,909; Wengel et al., U.S. Pat. No. 8,153,365; Wengel et al., U.S. Pat. No. 7,572,582; and Ramasamy et al., U.S. Pat. No. 6,525,191, Torsten et al., WO 2004/106356, Wengel et al., WO 1999/014226; Seth et al., WO 2007/134181; Seth et al., U.S. Pat. No. 7,547,684; Seth et al., U.S. Pat. No. 7,666,854; Seth et al., U.S. Pat. No. 8,088,746; Seth et al., U.S. Pat. No. 7,750,131; Seth et al., U.S. Pat. No. 8,030,467; Seth et al., U.S. Pat. No. 8,268,980; Seth et al., U.S. Pat. No. 8,546,556; Seth et al., U.S. Pat. No. 8,530,640; Migawa et al., U.S. Pat. No. 9,012,421; Seth et al., U.S. Pat. No. 8,501,805; Allerson et al., US2008/0039618; and Migawa et al., US2015/0191727. In certain embodiments, bicyclic sugar moieties and nucleosides incorporating such bicyclic sugar moieties are further defined by isomeric configuration. For example, an LNA nucleoside (described herein) may be in the α-L configuration or in the 0-D configuration.

[chemical structure]

α-L-methyleneoxy (4′-CH₂—O-2′) or α-L-LNA bicyclic nucleosides have been incorporated into oligonucleotides that showed antisense activity (Frieden et al., Nucleic Acids Research, 2003, 21, 6365-6372). The addition of locked nucleic acids to siRNAs has been shown to increase siRNA stability in serum, and to reduce off-target effects (Elmen, J. et al., (2005) Nucleic Acids Research 33(1):439-447; Mook, O R. et al., (2007) Mal Cane Ther 6(3):833-843; Grunweller, A. et al., (2003) Nucleic Acids Research 31(12):3185-3193). Herein, general descriptions of bicyclic nucleosides include both isomeric configurations. When the positions of specific bicyclic nucleosides (e.g., LNA or cEt) are identified in exemplified embodiments herein, they are in the β-D configuration, unless otherwise specified.

[0445] In certain embodiments, modified sugar moieties comprise one or more non-bridging sugar substituent and one or more bridging sugar substituent (e.g., 5′-substituted and 4′-2′ bridged sugars).

[0446] In certain embodiments, modified sugar moieties are sugar surrogates. In certain such embodiments, the oxygen atom of the sugar moiety is replaced, e.g., with a sulfur, carbon or nitrogen atom. In certain such embodiments, such modified sugar moieties also comprise bridging and/or non-bridging substituents as described herein. For example, certain sugar surrogates comprise a 4′-sulfur atom and a substitution at the 2′-position (see, e.g., Bhat et al., U.S. Pat. No. 7,875,733 and Bhat et al., U.S. Pat. No. 7,939,677) and/or the 5′ position.

[0447] In certain embodiments, sugar surrogates comprise rings having other than 5 atoms. For example, in certain embodiments, a sugar surrogate comprises a six-membered tetrahydropyran (“THP”). Such tetrahydropyrans may be further modified or substituted. Nucleosides comprising such modified tetrahydropyrans include but are not limited to hexitol nucleic acid (“HNA”), anitol nucleic acid (“ANA”), manitol nucleic acid (“MNA”) (see, e.g., Leumann, C J. Bioorg. & Med. Chem. 2002, 10, 841-854), fluoro HNA:

[chemical structure]

(“F-HNA”, see e.g. Swayze et al., U.S. Pat. No. 8,088,904; Swayze et al., U.S. Pat. No. 8,440,803; Swayze et al., U.S. Pat. No. 8,796,437; and Swayze et al., U.S. Pat. No. 9,005,906; F-HNA can also be referred to as a F-THP or 3′-fluoro tetrahydropyran), and nucleosides comprising additional modified THP compounds having the formula:

[chemical structure]

wherein, independently, for each of said modified THP nucleoside:

[0448] Bx is a nucleobase moiety;

[0449] T₃ and T₄ are each, independently, an internucleoside linking group linking the modified THP nucleoside to the remainder of an oligonucleotide or one of T3 and T4 is an internucleoside linking group linking the modified THP nucleoside to the remainder of an oligonucleotide and the other of T3 and T4 is H, a hydroxyl protecting group, a linked conjugate group, or a 5′ or 3′-terminal group; q₁, q₂, q₃, q₄, q₅, q₆ and q₇ are each, independently, H, C₁-C₆ alkyl, substituted C₁-C₆ alkyl, C₂-C₆ alkenyl, substituted C₂-C₆ alkenyl, C₂-C₆ alkynyl, or substituted C₂-C₆ alkynyl; and

[0450] each of R₁ and R₂ is independently selected from among: hydrogen, halogen, substituted or unsubstituted alkoxy, NJ₁J₂, SJ₁, N₃, OC(═X)J₁, OC(═X)NJ₁J₂, NJ₃C(═X)NJ₁J₂, and CN, wherein X is O, S or NJ₁, and each J₁, J₂, and J₃ is, independently, H or C₁-C₆ alkyl.

[0451] In certain embodiments, modified THP nucleosides are provided wherein q₁, q₂, q₃, q₄, q₅, q₆ and q₇ are each H. In certain embodiments, at least one of q₁, q₂, q₃, q₄, q₅, q₆ and q₇ is other than H. In certain embodiments, at least one of q₁, q₂, q₃, q₄, q₅, q₆ and q₇ is methyl. In certain embodiments, modified THP nucleosides are provided wherein one of R₁ and R₂ is F. In certain embodiments, R₁ is F and R₂ is H, in certain embodiments, R₁ is methoxy and R₂ is H, and in certain embodiments, R₁ is methoxyethoxy and R₂ is H.

[0452] In certain embodiments, sugar surrogates comprise rings having more than 5 atoms and more than one heteroatom. For example, nucleosides comprising morpholino sugar moieties and their use in oligonucleotides have been reported (see, e.g., Braasch et al., Biochemistry, 2002, 41, 4503-4510 and Summerton et al., U.S. Pat. No. 5,698,685; Summerton et al., U.S. Pat. No. 5,166,315; Summerton et al., U.S. Pat. No. 5,185,444; and Summerton et al., U.S. Pat. No. 5,034,506). As used here, the term “morpholino” means a sugar surrogate having the following structure:

[chemical structure]

In certain embodiments, morpholinos may be modified, for example by adding or altering various substituent groups from the above morpholino structure. Such sugar surrogates are referred to herein as “modified morpholinos.”

[0453] In certain embodiments, sugar surrogates comprise acyclic moieties. Examples of nucleosides and oligonucleotides comprising such acyclic sugar surrogates include but are not limited to: peptide nucleic acid (“PNA”), acyclic butyl nucleic acid (see, e.g., Kumar et al., Org. Biomol. Chem., 2013, 11, 5853-5865), and nucleosides and oligonucleotides described in Manoharan et al., WO2011/133876. In certain embodiments, sugar surrogates comprise acyclic moieties. Examples of nucleosides and oligonucleotides comprising such acyclic sugar surrogates include, but are not limited to: peptide nucleic acid (“PNA”), acyclic butyl nucleic acid (see, e.g., Kumar et al., Org. Biomol. Chem., 2013, 11, 5853-5865), and nucleosides and oligonucleotides described in Manoharan et al., US2013/130378. Representative U.S. patents that teach the preparation of PNA compounds include, but are not limited to, U.S. Pat. Nos. 5,539,082; 5,714,331; and 5,719,262. Additional PNA compounds suitable for use in the RNAi oligonucleotides of the invention are described in, for example, in Nielsen et al., Science, 1991, 254, 1497-1500.

[0454] In certain embodiments, sugar surrogates are the “unlocked” sugar structure of UNA (unlocked nucleic acid) nucleosides. UNA is an unlocked acyclic nucleic acid, wherein any of the bonds of the sugar has been removed, forming an unlocked sugar surrogate. Representative U.S. publications that teach the preparation of UNA include, but are not limited to, U.S. Pat. No. 8,314,227; and US Patent Publication Nos. 2013/0096289; 2013/0011922; and 2011/0313020, the entire contents of each of which are hereby incorporated herein by reference.

[0455] In certain embodiments, sugar surrogates are the glycerol as found in GNA (glycol nucleic acid) nucleosides as depicted below:

[chemical structure]

[0456] where Bx represents any nucleobase.

[0457] Many other bicyclic and tricyclic sugar and sugar surrogats are known in the art that can be used in modified nucleosides.

[0458] 2. Certain Modified Nucleobases

[0459] In certain embodiments, modified oligonucleotides comprise one or more nucleoside comprising an unmodified nucleobase. In certain embodiments, modified oligonucleotides comprise one or more nucleoside comprising a modified nucleobase. In certain embodiments, modified oligonucleotides comprise one or more nucleoside that does not comprise a nucleobase, referred to as an abasic nucleoside. In certain embodiments, modified oligonucleotides comprise one or more inosine nucleosides (i.e., nucleosides comprising a hypoxanthine nucleobase).

[0460] In certain embodiments, modified nucleobases are selected from: 5-substituted pyrimidines, 6-azapyrimidines, alkyl or alkynyl substituted pyrimidines, alkyl substituted purines, and N-2, N-6 and O-6 substituted purines. In certain embodiments, modified nucleobases are selected from: 5-methylcytosine, 2-aminopropyladenine, 5-hydroxymethyl cytosine, xanthine, hypoxanthine, 2-aminoadenine, 6-N-methylguanine, 6-N-methyladenine, 2-propyladenine, 2-thiouracil, 2-thiothymine and 2-thiocytosine, 5-propynyl (—C≡C—CH₃) uracil, 5-propynylcytosine, 6-azouracil, 6-azocytosine, 6-azothymine, 5-ribosyluracil (pseudouracil), 4-thiouracil, 8-halo, 8-amino, 8-thiol, 8-thioalkyl, 8-hydroxyl, 8-aza and other 8-substituted purines, 5-halo, particularly 5-bromo, 5-trifluoromethyl, 5-halouracil, and 5-halocytosine, 7-methylguanine, 7-methyladenine, 2-F-adenine, 2-aminoadenine, 7-deazaguanine, 7-deazaadenine, 3-deazaguanine, 3-deazaadenine, 6-N-benzoyladenine, 2-N-isobutyrylguanine, 4-N-benzoylcytosine, 4-N-benzoyluracil, 5-methyl 4-N-benzoylcytosine, 5-methyl 4-N-benzoyluracil, universal bases, hydrophobic bases, promiscuous bases, size-expanded bases, and fluorinated bases. Further modified nucleobases include tricyclic pyrimidines, such as 1,3-diazaphenoxazine-2-one, 1,3-diazaphenothiazine-2-one and 9-(2-aminoethoxy)-1,3-diazaphenoxazine-2-one (G-clamp). Modified nucleobases may also include those in which the purine or pyrimidine base is replaced with other heterocycles, for example 7-deaza-adenine, 7-deazaguanosine, 2-aminopyridine and 2-pyridone. Further nucleobases include those disclosed in Merigan et al., U.S. Pat. No. 3,687,808, those disclosed in The Concise Encyclopedia Of Polymer Science And Engineering, Kroschwitz, J. I., Ed., John Wiley & Sons, 1990, 858-859; Englisch et al., Angewandte Chemie, International Edition, 1991, 30, 613; Sanghvi, Y. S., Chapter 15, Antisense Research and Applications, Crooke, S. T. and Lebleu, B., Eds., CRC Press, 1993, 273-288; and those disclosed in Chapters 6 and 15, Antisense Drug Technology, Crooke S. T., Ed., CRC Press, 2008, 163-166 and 442-443.

[0461] Publications that teach the preparation of certain of the above noted modified nucleobases as well as other modified nucleobases include without limitation, Manoharan et al., US2003/0158403; Manoharan et al., US2003/0175906; Dinh et al., U.S. Pat. No. 4,845,205; Spielvogel et al., U.S. Pat. No. 5,130,302; Rogers et al., U.S. Pat. No. 5,134,066; Bischofberger et al., U.S. Pat. No. 5,175,273; Urdea et al., U.S. Pat. No. 5,367,066; Benner et al., U.S. Pat. No. 5,432,272; Matteucci et al., U.S. Pat. No. 5,434,257; Gmeiner et al., U.S. Pat. No. 5,457,187; Cook et al., U.S. Pat. No. 5,459,255; Froehler et al., U.S. Pat. No. 5,484,908; Matteucci et al., U.S. Pat. No. 5,502,177; Hawkins et al., U.S. Pat. No. 5,525,711; Haralambidis et al., U.S. 5,552,540; Cook et al., U.S. Pat. No. 5,587,469; Froehler et al., U.S. Pat. No. 5,594,121; Switzer et al., U.S. Pat. No. 5,596,091; Cook et al., U.S. Pat. No. 5,614,617; Froehler et al., U.S. Pat. No. 5,645,985; Cook et al., U.S. Pat. No. 5,681,941; Cook et al., U.S. Pat. No. 5,811,534; Cook et al., U.S. Pat. No. 5,750,692; Cook et al., U.S. Pat. No. 5,948,903; Cook et al., U.S. Pat. No. 5,587,470; Cook et al., U.S. Pat. No. 5,457,191; Matteucci et al., U.S. Pat. No. 5,763,588; Froehler et al., U.S. Pat. No. 5,830,653; Cook et al., U.S. Pat. No. 5,808,027; Cook et al., U.S. Pat. No. 6,166,199; and Matteucci et al., U.S. Pat. No. 6,005,096.

[0462] 3. Certain Modified Internucleoside Linkages

[0463] The naturally occurring internucleoside linkage of RNA and DNA is a 3′ to 5′ phosphodiester linkage. In certain embodiments, nucleosides of modified oligonucleotides may be linked together using one or more modified internucleoside linkages. The two main classes of internucleoside linking groups are defined by the presence or absence of a phosphorus atom. Representative phosphorus-containing internucleoside linkages include but are not limited to phosphates, which contain a phosphodiester bond (“P═O”) (also referred to as unmodified or naturally occurring linkages), phosphotriesters, methylphosphonates, phosphoramidates, and phosphorothioates (“P═S”), and phosphorodithioates (“HS-P═S”). Representative non-phosphorus containing internucleoside linking groups include but are not limited to methylenemethylimino (—CH₂—N(CH₃)—O—CH₂—), thiodiester, thionocarbamate (—O—C(═O)(NH)—S—); siloxane (—O—SiH₂—O—); and N,N′-dimethylhydrazine (—CH₂—N(CH₃)—N(CH₃)—). Modified internucleoside linkages, compared to naturally occurring phosphate linkages, can be used to alter, typically increase, nuclease resistance of the oligonucleotide. In certain embodiments, internucleoside linkages having a chiral atom can be prepared as a racemic mixture, or as separate enantiomers. Methods of preparation of phosphorous-containing and non-phosphorous-containing internucleoside linkages are well known to those skilled in the art.

[0464] Representative internucleoside linkages having a chiral center include but are not limited to alkylphosphonates and phosphorothioates. Modified oligonucleotides comprising internucleoside linkages having a chiral center can be prepared as populations of modified oligonucleotides comprising stereorandom internucleoside linkages, or as populations of modified oligonucleotides comprising phosphorothioate linkages in particular stereochemical configurations. In certain embodiments, populations of modified oligonucleotides comprise phosphorothioate internucleoside linkages wherein all of the phosphorothioate internucleoside linkages are stereorandom. Such modified oligonucleotides can be generated using synthetic methods that result in random selection of the stereochemical configuration of each phosphorothioate linkage. Nonetheless, each individual phosphorothioate of each individual oligonucleotide molecule has a defined stereoconfiguration. In certain embodiments, populations of modified oligonucleotides are enriched for modified oligonucleotides comprising one or more particular phosphorothioate internucleoside linkages in a particular, independently selected stereochemical configuration. In certain embodiments, the particular configuration of the particular phosphorothioate linkage is present in at least 65% of the molecules in the population. In certain embodiments, the particular configuration of the particular phosphorothioate linkage is present in at least 70% of the molecules in the population. In certain embodiments, the particular configuration of the particular phosphorothioate linkage is present in at least 80% of the molecules in the population. In certain embodiments, the particular configuration of the particular phosphorothioate linkage is present in at least 90% of the molecules in the population. In certain embodiments, the particular configuration of the particular phosphorothioate linkage is present in at least 99% of the molecules in the population. Such chirally enriched populations of modified oligonucleotides can be generated using synthetic methods known in the art, e.g., methods described in Oka et al., JACS 125, 8307 (2003), Wan et al. Nuc. Acid. Res. 42, 13456 (2014), and WO 2017/015555. In certain embodiments, a population of modified oligonucleotides is enriched for modified oligonucleotides having at least one indicated phosphorothioate in the (Sp) configuration. In certain embodiments, a population of modified oligonucleotides is enriched for modified oligonucleotides having at least one phosphorothioate in the (Rp) configuration. In certain embodiments, modified oligonucleotides comprising (Rp) and/or (Sp) phosphorothioates comprise one or more of the following formulas, respectively, wherein “B” indicates a nucleobase:

[chemical structure]

Unless otherwise indicated, chiral internucleoside linkages of modified oligonucleotides described herein can be stereorandom or in a particular stereochemical configuration.

[0465] Neutral internucleoside linkages include, without limitation, phosphotriesters, methylphosphonates, MMI (3′—CH₂—N(CH₃)—O-5), amide-3 (3′—CH₂—C(═O)—N(H)-5), amide-4 (3′—CH₂—N(H)—C(═O)-5), formacetal (3′-O—CH₂—O-5′), methoxypropyl (MOP), and thioformacetal (3′-S—CH₂—O-5′). Further neutral internucleoside linkages include nonionic linkages comprising siloxane (dialkylsiloxane), carboxylate ester, carboxamide, sulfide, sulfonate ester and amides (See for example: Carbohydrate Modifications in Antisense Research; Y. S. Sanghvi and P. D. Cook, Eds., ACS Symposium Series 580; Chapters 3 and 4, 40-65). Further neutral internucleoside linkages include nonionic linkages comprising mixed N, O, S and CH₂ component parts.

[0466] In certain embodiments, modified oligonucleotides (such as antisense RNAi oligonucleotides and/or sense RNAi oligonucleotides) comprise one or more inverted nucleoside, as shown below:

[chemical structure]

wherein each Bx independently represents any nucleobase.

[0467] In certain embodiments, an inverted nucleoside is terminal (i.e., the last nucleoside on one end of an oligonucleotide) and so only one internucleoside linkage depicted above will be present. In certain such embodiments, additional features (such as a conjugate group) may be attached to the inverted nucleoside. Such terminal inverted nucleosides can be attached to either or both ends of an oligonucleotide.

[0468] In certain embodiments, such groups lack a nucleobase and are referred to herein as inverted sugar moieties. In certain embodiments, an inverted sugar moiety is terminal (i.e., attached to the last nucleoside on one end of an oligonucleotide) and so only one internucleoside linkage above will be present. In certain such embodiments, additional features (such as a conjugate group) may be attached to the inverted sugar moiety. Such terminal inverted sugar moieties can be attached to either or both ends of an oligonucleotide.

[0469] In certain embodiments, nucleic acids can be linked 2′ to 5′ rather than the standard 3′ to 5′ linkage. Such a linkage is illustrated below.

[chemical structure]

wherein each Bx represents any nucleobase.

[0470] B. Certain Motifs

[0471] In certain embodiments, modified oligonucleotides comprise one or more modified nucleosides comprising a modified sugar moiety. In certain embodiments, modified oligonucleotides comprise one or more modified nucleosides comprising a modified nucleobase. In certain embodiments, modified oligonucleotides comprise one or more modified internucleoside linkage. In such embodiments, the modified, unmodified, and differently modified sugar moieties, nucleobases, and/or internucleoside linkages of a modified oligonucleotide define a pattern or motif. In certain embodiments, the patterns of sugar moieties, nucleobases, and internucleoside linkages are each independent of one another. Thus, a modified oligonucleotide may be described by its sugar motif, nucleobase motif and/or internucleoside linkage motif (as used herein, nucleobase motif describes the modifications to the nucleobases independent of the sequence of nucleobases).

[0472] 1. Certain Sugar Motifs

[0473] In certain embodiments, oligonucleotides comprise one or more type of modified sugar and/or unmodified sugar moiety arranged along the oligonucleotide or region thereof in a defined pattern or sugar motif. In certain instances, such sugar motifs include but are not limited to any of the sugar modifications discussed herein.

### Uniformly Modified Oligonucleotides

[0474] In certain embodiments, modified oligonucleotides comprise or consist of a region having a fully modified sugar motif. In such embodiments, each nucleoside of the fully modified region of the modified oligonucleotide comprises a modified sugar moiety. In certain embodiments, each nucleoside of the entire modified oligonucleotide comprises a modified sugar moiety. In certain embodiments, modified oligonucleotides comprise or consist of a region having a fully modified sugar motif, wherein each nucleoside within the fully modified region comprises the same modified sugar moiety, referred to herein as a uniformly modified sugar motif. In certain embodiments, a fully modified oligonucleotide is a uniformly modified oligonucleotide. In certain embodiments, each nucleoside of a uniformly modified nucleotide comprises the same 2′-modification.

### Gapmer Oligonucleotides

[0475] In certain embodiments, modified oligonucleotides comprise or consist of a region having a gapmer motif, which is defined by two external regions or “wings” and a central or internal region or “gap.” The three regions of a gapmer motif (the 5′-wing, the gap, and the 3′-wing) form a contiguous sequence of nucleosides wherein at least some of the sugar moieties of the nucleosides of each of the wings differ from at least some of the sugar moieties of the nucleosides of the gap. Specifically, at least the sugar moieties of the nucleosides of each wing that are closest to the gap (the 3′-most nucleoside of the 5′-wing and the 5′-most nucleoside of the 3′-wing) differ from the sugar moiety of the neighboring gap nucleosides, thus defining the boundary between the wings and the gap (i.e., the wing/gap junction). In certain embodiments, the sugar moieties within the gap are the same as one another. In certain embodiments, the gap includes one or more nucleoside having a sugar moiety that differs from the sugar moiety of one or more other nucleosides of the gap. In certain embodiments, the sugar motifs of the two wings are the same as one another (symmetric gapmer). In certain embodiments, the sugar motif of the 5′-wing differs from the sugar motif of the 3′-wing (asymmetric gapmer).

[0476] In certain embodiments, the wings of a gapmer comprise 1-6 nucleosides. In certain embodiments, each nucleoside of each wing of a gapmer comprises a modified sugar moiety. In certain embodiments, at least one nucleoside of each wing of a gapmer comprises a modified sugar moiety. In certain embodiments, at least two nucleosides of each wing of a gapmer comprises a modified sugar moiety. In certain embodiments, at least three nucleosides of each wing of a gapmer comprises a modified sugar moiety. In certain embodiments, at least four nucleosides of each wing of a gapmer comprises a modified sugar moiety.

[0477] In certain embodiments, the gap of a gapmer comprises 7-12 nucleosides. In certain embodiments, each nucleoside of the gap of a gapmer comprises a 2′-β-D-deoxyribosyl sugar moiety. In certain embodiments, at least one nucleoside of the gap of a gapmer comprises a modified sugar moiety.

[0478] In certain embodiments, the gapmer is a deoxy gapmer. In certain embodiments, the nucleosides on the gap side of each wing/gap junction comprise 2′-deoxyribosyl sugar moieties and the nucleosides on the wing sides of each wing/gap junction comprise modified sugar moieties. In certain embodiments, each nucleoside of the gap comprises a 2′-β-D-deoxyribosyl sugar moiety. In certain embodiments, each nucleoside of each wing of a gapmer comprises a modified sugar moiety. In certain embodiments, at least one nucleoside of the gap of a gapmer comprises a modified sugar moiety. In certain embodiments, at least one nucleoside of the gap of a gapmer comprises a 2′-OMe sugar moiety.

[0479] Herein, the lengths (number of nucleosides) of the three regions of a gapmer may be provided using the notation [# of nucleosides in the 5′-wing]−[# of nucleosides in the gap]−[# of nucleosides in the 3′-wing]. Thus, a 3-10-3 gapmer consists of 3 linked nucleosides in each wing and 10 linked nucleosides in the gap. Where such nomenclature is followed by a specific modification, that modification is the modification in each sugar moiety of each wing and the gap nucleosides comprise 2′-β-D-deoxyribosyl sugar moieties. Thus, a 5-10-5 MOE gapmer consists of 5 linked 2′-MOE nucleosides in the 5′-wing, 10 linked 2′-β-D-deoxynucleosides in the gap, and 5 linked 2′-MOE nucleosides in the 3′-wing. A 3-10-3 cEt gapmer consists of 3 linked cEt nucleosides in the 5′-wing, 10 linked 2′-α-D-deoxynucleosides in the gap, and 3 linked cEt nucleosides in the 3′-wing. A 5-8-5 gapmer consists of 5 linked nucleosides comprising a modified sugar moiety in the 5′-wing, 8 linked 2′-β-D-deoxynucleosides in the gap, and 5 linked nucleosides comprising a modified sugar moiety in the 3′-wing. A 5-8-5 mixed gapmer has at least two different modified sugar moieties in the 5′- and/or the 3′-wing.

[0480] In certain embodiments, modified oligonucleotides are 5-10-5 MOE gapmers. In certain embodiments, modified oligonucleotides are 3-10-3 BNA gapmers. In certain embodiments, modified oligonucleotides are 3-10-3 cEt gapmers. In certain embodiments, modified oligonucleotides are 3-10-3 LNA gapmers.

[0481] In certain embodiments, modified oligonucleotides are 5-8-5 mixed gapmers that consist of 5 linked 2′-MOE nucleosides in the 5′-wing, 8 linked 2′-β-D-deoxynucleosides in the gap, and a mixture of cEt and 2′-MOE nucleosides in the 3′-wing. In certain embodiments, modified nucleosides have a sugar motif of eeeeeddddddddkkeee, where each “e” represents a nucleoside comprising a 2′-MOE modified sugar moiety, each “d” represents a nucleoside comprising a 2′-β-D-deoxyribosyl sugar moiety, and each “k” represents a nucleoside comprising a cEt modified sugar moiety. In certain embodiments, modified nucleosides have a sugar motif of eeeeeddddddddkeeee, where each “e” represents a nucleoside comprising a 2′-MOE modified sugar moiety, each “d” represents a nucleoside comprising a 2′-β-D-deoxyribosyl sugar moiety, and each “k” represents a nucleoside comprising a cEt modified sugar moiety.

### Antisense RNAi Oligonucleotides

[0482] In certain embodiments, the sugar moiety of at least one nucleoside of an antisense RNAi oligonucleotide is a modified sugar moiety.

[0483] In certain such embodiments, at least one nucleoside comprises a 2′-OMe modified sugar moiety. In certain embodiments, at least 2 nucleosides comprise 2′-OMe modified sugar moieties. In certain embodiments, at least 5 nucleosides comprise 2′-OMe modified sugar moieties. In certain embodiments, at least 8 nucleosides comprise 2′-OMe modified sugar moieties. In certain embodiments, at least 10 nucleosides comprise 2′-OMe modified sugar moieties. In certain embodiments, at least 12 nucleosides comprise 2′-OMe modified sugar moieties. In certain embodiments, at least 14 nucleosides comprise 2′-OMe modified sugar moieties. In certain embodiments, at least 15 nucleosides comprise 2′-OMe modified sugar moieties. In certain embodiments, at least 17 nucleosides comprise 2′-OMe modified sugar moieties. In certain such embodiments, at least 18 nucleosides comprise 2′-OMe modified sugar moieties. In certain such embodiments, at least 20 nucleosides comprise 2′-OMe modified sugar moieties. In certain such embodiments, at least 21 nucleosides comprise 2′-OMe modified sugar moieties.

[0484] In certain embodiments, at least one nucleoside comprises a 2′-F modified sugar. In certain embodiments, at least 2 nucleosides comprise 2′-F modified sugar moieties. In certain embodiments, at least 3 nucleosides comprise 2′-F modified sugar moieties. In certain embodiments, at least 4 nucleosides comprise 2′-F modified sugar moieties. In certain embodiments, one, but not more than one nucleoside comprises a 2′-F modified sugar. In certain embodiments, 1 or 2 nucleosides comprise 2′-F modified sugar moieties. In certain embodiments, 1-3 nucleosides comprise 2′-F modified sugar moieties. In certain embodiments, at least 1-4 nucleosides comprise 2′-F modified sugar moieties. In certain embodiments, antisense RNAi oligonucleotides have a block of 2-4 contiguous 2′-F modified nucleosides. In certain embodiments, 4 nucleosides of an antisense RNAi oligonucleotide are 2′-F modified nucleosides and 3 of those 2′-F modified nucleosides are contiguous. In certain such embodiments the remainder of the nucleosides are 2′OMe modified.

### Sense RNAi Oligonucleotides

[0485] In certain embodiments, the sugar moiety of at least one nucleoside of a sense RNAi oligonucleotides is a modified sugar moiety.

[0486] In certain such embodiments, at least one nucleoside comprises a 2′-OMe modified sugar moiety. In certain embodiments, at least 2 nucleosides comprise 2′-OMe modified sugar moieties. In certain embodiments, at least 5 nucleosides comprise 2′-OMe modified sugar moieties. In certain embodiments, at least 8 nucleosides comprise 2′-OMe modified sugar moieties. In certain embodiments, at least 10 nucleosides comprise 2′-OMe modified sugar moieties. In certain embodiments, at least 12 nucleosides comprise 2′-OMe modified sugar moieties. In certain embodiments, at least 14 nucleosides comprise 2′-OMe modified sugar moieties. In certain embodiments, at least 15 nucleosides comprise 2′-OMe modified sugar moieties. In certain embodiments, at least 17 nucleosides comprise 2′-OMe modified sugar moieties. In certain such embodiments, at least 18 nucleosides comprise 2′-OMe modified sugar moieties. In certain such embodiments, at least 20 nucleosides comprise 2′-OMe modified sugar moieties. In certain such embodiments, at least 21 nucleosides comprise 2′-OMe modified sugar moieties.

[0487] In certain embodiments, at least one nucleoside comprises a 2′-F modified sugar moiety. In certain embodiments, at least 2 nucleosides comprise 2′-F modified sugar moieties. In certain embodiments, at least 3 nucleosides comprise 2′-F modified sugar moieties. In certain embodiments, at least 4 nucleosides comprise 2′-F modified sugar moieties. In certain embodiments, one, but not more than nucleoside comprises a 2′-F modified sugar moiety. In certain embodiments, 1 or 2 nucleosides comprise 2′-F modified sugar moieties. In certain embodiments, 1-3 nucleosides comprise 2′-F modified sugar moieties. In certain embodiments, at least 1-4 nucleosides comprise 2′-F modified sugar moieties. In certain embodiments, sense RNAi oligonucleotides have a block of 2-4 contiguous 2′-F modified nucleosides. In certain embodiments, 4 nucleosides of a sense RNAi oligonucleotide are 2′-F modified nucleosides and 3 of those 2′-F modified nucleosides are contiguous. In certain such embodiments the remainder of the nucleosides are 2′OMe modified.

[0488] 2. Certain Nucleobase Motifs

[0489] In certain embodiments, oligonucleotides comprise modified and/or unmodified nucleobases arranged along the oligonucleotide or region thereof in a defined pattern or motif. In certain embodiments, each nucleobase is modified. In certain embodiments, none of the nucleobases are modified. In certain embodiments, each purine or each pyrimidine is modified. In certain embodiments, each adenine is modified. In certain embodiments, each guanine is modified. In certain embodiments, each thymine is modified. In certain embodiments, each uracil is modified. In certain embodiments, each cytosine is modified. In certain embodiments, some or all of the cytosine nucleobases in a modified oligonucleotide are 5-methyl cytosines. In certain embodiments, all of the cytosine nucleobases are 5-methyl cytosines and all of the other nucleobases of the modified oligonucleotide are unmodified nucleobases.

[0490] In certain embodiments, modified oligonucleotides comprise a block of modified nucleobases. In certain such embodiments, the block is at the 3′-end of the oligonucleotide. In certain embodiments the block is within 3 nucleosides of the 3′-end of the oligonucleotide. In certain embodiments, the block is at the 5′-end of the oligonucleotide. In certain embodiments the block is within 3 nucleosides of the 5′-end of the oligonucleotide.

### Gapmer Oligonucleotides

[0491] In certain embodiments, oligonucleotides having a gapmer motif comprise a nucleoside comprising a modified nucleobase. In certain such embodiments, one nucleoside comprising a modified nucleobase is in the central gap of an oligonucleotide having a gapmer motif. In certain such embodiments, the sugar moiety of said nucleoside is a 2′-deoxyribosyl sugar moiety. In certain embodiments, the modified nucleobase is selected from: a 2-thiopyrimidine and a 5-propynepyrimidine.

### Antisense RNAi Oligonucleotides

[0492] In certain embodiments, one nucleoside of an antisense RNAi oligonucleotide is a UNA. In certain embodiments, one nucleoside of an antisense RNAi oligonucleotide is a GNA. In certain embodiments, 1-4 nucleosides of an antisense RNAi oligonucleotide is/are DNA. In certain such embodiments, the 1-4 DNA nucleosides are at one or both ends of the antisense RNAi oligonucleotide.

### Sense RNAi Oligonucleotides

[0493] In certain embodiments, one nucleoside of a sense RNAi oligonucleotide is a UNA.

[0494] In certain embodiments, one nucleoside of a sense RNAi oligonucleotide is a GNA.

[0495] In certain embodiments, 1-4 nucleosides of a sense RNAi oligonucleotide is/are DNA. In certain such embodiments, the 1-4 DNA nucleosides are at one or both ends of the sense RNAi oligonucleotide.

[0496] 3. Certain Internucleoside Linkage Motifs

[0497] In certain embodiments, oligonucleotides comprise modified and/or unmodified internucleoside linkages arranged along the oligonucleotide or region thereof in a defined pattern or motif. In certain embodiments, each internucleoside linking group is a phosphodiester internucleoside linkage (P═O). In certain embodiments, each internucleoside linking group of a modified oligonucleotide is a phosphorothioate internucleoside linkage (β=S). In certain embodiments, each internucleoside linkage of a modified oligonucleotide is independently selected from a phosphorothioate internucleoside linkage and phosphodiester internucleoside linkage. In certain embodiments, each phosphorothioate internucleoside linkage is independently selected from a stereorandom phosphorothioate a (Sp) phosphorothioate, and a (Rp) phosphorothioate.

### Gapmer Oligonucleotides

[0498] In certain embodiments, the sugar motif of a modified oligonucleotide is a gapmer and the internucleoside linkages within the gap are all modified. In certain such embodiments, some or all of the internucleoside linkages in the wings are unmodified phosphodiester internucleoside linkages. In certain embodiments, the terminal internucleoside linkages are modified. In certain embodiments, the sugar motif of a modified oligonucleotide is a gapmer, and the internucleoside linkage motif comprises at least one phosphodiester internucleoside linkage in at least one wing, wherein the at least one phosphodiester linkage is not a terminal internucleoside linkage, and the remaining internucleoside linkages are phosphorothioate internucleoside linkages. In certain such embodiments, all of the phosphorothioate linkages are stereorandom. In certain embodiments, all of the phosphorothioate linkages in the wings are (Sp) phosphorothioates, and the gap comprises at least one Sp, Sp, Rp motif. In certain embodiments, populations of modified oligonucleotides are enriched for modified oligonucleotides comprising such internucleoside linkage motifs.

[0499] In certain embodiments, modified nucleotides have an internucleoside linkage motif of sososssssssssosss, wherein each “s” represents a phosphorothioate internucleoside linkage and each “o” represents a phosphate internucleoside linkage. In certain embodiments, modified nucleotides have an internucleoside linkage motif of sooosssssssssooss, wherein each “s” represents a phosphorothioate internucleoside linkage and each “o” represents a phosphate internucleoside linkage. In certain embodiments, modified nucleotides have an internucleoside linkage motif of sooosssssssssooss, wherein each “s” represents a phosphorothioate internucleoside linkage and each “o” represents a phosphate internucleoside linkage.

### Antisense RNAi Oligonucleotides

[0500] In certain embodiments, at least one linkage of the antisense RNAi oligonucleotide is a modified linkage. In certain embodiments, the 5′-most linkage (i.e., linking the first nucleoside from the 5′-end to the second nucleoside from the 5′-end) is modified. In certain embodiments, the two 5′-most linkages are modified. In certain embodiments, the first one or 2 linkages from the 3′-end are modified. In certain such embodiments, the modified linkage is a phosphorothioate linkage. In certain embodiments, the remaining linkages are all unmodified phosphodiester linkages.

[0501] In certain embodiments, at least one linkage of the antisense RNAi oligonucleotide is an inverted linkage.

### Sense RNAi Oligonucleotides

[0502] In certain embodiments, at least one linkage of the sense RNAi oligonucleotides is a modified linkage. In certain embodiments, the 5′-most linkage (i.e., linking the first nucleoside from the 5′-end to the second nucleoside from the 5′-end) is modified. In certain embodiments, the two 5′-most linkages are modified. In certain embodiments, the first one or 2 linkages from the 3′-end are modified. In certain such embodiments, the modified linkage is a phosphorothioate linkage. In certain embodiments, the remaining linkages are all unmodified phosphodiester linkages.

[0503] In certain embodiments, at least one linkage of the sense RNAi oligonucleotides is an inverted linkage.

### C. Certain Lengths

[0504] It is possible to increase or decrease the length of an oligonucleotide without eliminating activity. For example, in Woolf et al. (Proc. Natl. Acad. Sci. USA 89:7305-7309, 1992), a series of oligonucleotides 13-25 nucleobases in length were tested for their ability to induce cleavage of a target RNA in an oocyte injection model. Oligonucleotides 25 nucleobases in length with 8 or 11 mismatch bases near the ends of the oligonucleotides were able to direct specific cleavage of the target RNA, albeit to a lesser extent than the oligonucleotides that contained no mismatches. Similarly, target specific cleavage was achieved using 13 nucleobase oligonucleotides, including those with 1 or 3 mismatches.

[0505] In certain embodiments, oligonucleotides (including modified oligonucleotides) can have any of a variety of ranges of lengths. In certain embodiments, oligonucleotides consist of X to Y linked nucleosides, where X represents the fewest number of nucleosides in the range and Y represents the largest number nucleosides in the range. In certain such embodiments, X and Y are each independently selected from 8, 9, 10, 11, 12, 13, 14, 15, 16, 17, 18, 19, 20, 21, 22, 23, 24, 25, 26, 27, 28, 29, 30, 31, 32, 33, 34, 35, 36, 37, 38, 39, 40, 41, 42, 43, 44, 45, 46, 47, 48, 49, and 50; provided that X≤Y. For example, in certain embodiments, oligonucleotides consist of 12 to 13, 12 to 14, 12 to 15, 12 to 16, 12 to 17, 12 to 18, 12 to 19, 12 to 20, 12 to 21, 12 to 22, 12 to 23, 12 to 24, 12 to 25, 12 to 26, 12 to 27, 12 to 28, 12 to 29, 12 to 30, 13 to 14, 13 to 15, 13 to 16, 13 to 17, 13 to 18, 13 to 19, 13 to 20, 13 to 21, 13 to 22, 13 to 23, 13 to 24, 13 to 25, 13 to 26, 13 to 27, 13 to 28, 13 to 29, 13 to 30, 14 to 15, 14 to 16, 14 to 17, 14 to 18, 14 to 19, 14 to 20, 14 to 21, 14 to 22, 14 to 23, 14 to 24, 14 to 25, 14 to 26, 14 to 27, 14 to 28, 14 to 29, 14 to 30, 15 to 16, 15 to 17, 15 to 18, 15 to 19, 15 to 20, 15 to 21, 15 to 22, 15 to 23, 15 to 24, 15 to 25, 15 to 26, 15 to 27, 15 to 28, 15 to 29, 15 to 30, 16 to 17, 16 to 18, 16 to 19, 16 to 20, 16 to 21, 16 to 22, 16 to 23, 16 to 24, 16 to 25, 16 to 26, 16 to 27, 16 to 28, 16 to 29, 16 to 30, 17 to 18, 17 to 19, 17 to 20, 17 to 21, 17 to 22, 17 to 23, 17 to 24, 17 to 25, 17 to 26, 17 to 27, 17 to 28, 17 to 29, 17 to 30, 18 to 19, 18 to 20, 18 to 21, 18 to 22, 18 to 23, 18 to 24, 18 to 25, 18 to 26, 18 to 27, 18 to 28, 18 to 29, 18 to 30, 19 to 20, 19 to 21, 19 to 22, 19 to 23, 19 to 24, 19 to 25, 19 to 26, 19 to 29, 19 to 28, 19 to 29, 19 to 30, 20 to 21, 20 to 22, 20 to 23, 20 to 24, 20 to 25, 20 to 26, 20 to 27, 20 to 28, 20 to 29, 20 to 30, 21 to 22, 21 to 23, 21 to 24, 21 to 25, 21 to 26, 21 to 27, 21 to 28, 21 to 29, 21 to 30, 22 to 23, 22 to 24, 22 to 25, 22 to 26, 22 to 27, 22 to 28, 22 to 29, 22 to 30, 23 to 24, 23 to 25, 23 to 26, 23 to 27, 23 to 28, 23 to 29, 23 to 30, 24 to 25, 24 to 26, 24 to 27, 24 to 28, 24 to 29, 24 to 30, 25 to 26, 25 to 27, 25 to 28, 25 to 29, 25 to 30, 26 to 27, 26 to 28, 26 to 29, 26 to 30, 27 to 28, 27 to 29, 27 to 30, 28 to 29, 28 to 30, or 29 to 30 linked nucleosides.

### Antisense RNAi Oligonucleotides

[0506] In certain embodiments, antisense RNAi oligonucleotides consist of 17-30 linked nucleosides. In certain embodiments, antisense RNAi oligonucleotides consist of 17-25 linked nucleosides. In certain embodiments, antisense RNAi oligonucleotides consist of 17-23 linked nucleosides. In certain embodiments, antisense RNAi oligonucleotides consist of 17-21 linked nucleosides. In certain embodiments, antisense RNAi oligonucleotides consist of 18-30 linked nucleosides. In certain embodiments, antisense RNAi oligonucleotides consist of 20-30 linked nucleosides. In certain embodiments, antisense RNAi oligonucleotides consist of 21-30 linked nucleosides. In certain embodiments, antisense RNAi oligonucleotides consist of 23-30 linked nucleosides. In certain embodiments, antisense RNAi oligonucleotides consist of 18-25 linked nucleosides. In certain embodiments, antisense RNAi oligonucleotides consist of 20-22 linked nucleosides. In certain embodiments, antisense RNAi oligonucleotides consist of 21-23 linked nucleosides. In certain embodiments, antisense RNAi oligonucleotides consist of 23-24 linked nucleosides. In certain embodiments, antisense RNAi oligonucleotides consist of 20 linked nucleosides. In certain embodiments, antisense RNAi oligonucleotides consist of 21 linked nucleosides. In certain embodiments, antisense RNAi oligonucleotides consist of 22 linked nucleosides. In certain embodiments, antisense RNAi oligonucleotides consist of 23 linked nucleosides.

### Sense RNAi Oligonucleotides

[0507] In certain embodiments, sense RNAi oligonucleotides consist of 17-30 linked nucleosides. In certain embodiments, sense RNAi oligonucleotides consist of 17-25 linked nucleosides. In certain embodiments, sense RNAi oligonucleotides consist of 17-23 linked nucleosides. In certain embodiments, sense RNAi oligonucleotides consist of 17-21 linked nucleosides. In certain embodiments, sense RNAi oligonucleotides consist of 18-30 linked nucleosides. In certain embodiments, sense RNAi oligonucleotides consist of 20-30 linked nucleosides. In certain embodiments, sense RNAi oligonucleotides consist of 21-30 linked nucleosides. In certain embodiments, sense RNAi oligonucleotides consist of 23-30 linked nucleosides. In certain embodiments, sense RNAi oligonucleotides consist of 18-25 linked nucleosides. In certain embodiments, sense RNAi oligonucleotides consist of 20-22 linked nucleosides. In certain embodiments, sense RNAi oligonucleotides consist of 21-23 linked nucleosides. In certain embodiments, sense RNAi oligonucleotides consist of 23-24 linked nucleosides. In certain embodiments, sense RNAi oligonucleotides consist of 20 linked nucleosides. In certain embodiments, sense RNAi oligonucleotides consist of 21 linked nucleosides. In certain embodiments, sense RNAi oligonucleotides consist of 22 linked nucleosides. In certain embodiments, sense RNAi oligonucleotides consist of 23 linked nucleosides.

[0508] D. Certain Modified Oligonucleotides

[0509] In certain embodiments, the above modifications (sugar, nucleobase, internucleoside linkage) are incorporated into a modified oligonucleotide. In certain embodiments, modified oligonucleotides are characterized by their modification motifs and overall lengths. In certain embodiments, such parameters are each independent of one another. Thus, unless otherwise indicated, each internucleoside linkage of an oligonucleotide having a gapmer sugar motif may be modified or unmodified and may or may not follow the gapmer modification pattern of the sugar modifications. For example, the internucleoside linkages within the wing regions of a sugar gapmer may be the same or different from one another and may be the same or different from the internucleoside linkages of the gap region of the sugar motif. Likewise, such sugar gapmer oligonucleotides may comprise one or more modified nucleobase independent of the gapmer pattern of the sugar modifications. Unless otherwise indicated, all modifications are independent of nucleobase sequence.

[0510] E. Certain Populations of Modified Oligonucleotides

[0511] Populations of modified oligonucleotides in which all of the modified oligonucleotides of the population have the same molecular formula can be stereorandom populations or chirally enriched populations. All of the chiral centers of all of the modified oligonucleotides are stereorandom in a stereorandom population. In a chirally enriched population, at least one particular chiral center is not stereorandom in the modified oligonucleotides of the population. In certain embodiments, the modified oligonucleotides of a chirally enriched population are enriched for β-D ribosyl sugar moieties, and all of the phosphorothioate internucleoside linkages are stereorandom. In certain embodiments, the modified oligonucleotides of a chirally enriched population are enriched for both β-D ribosyl sugar moieties and at least one, particular phosphorothioate internucleoside linkage in a particular stereochemical configuration.

[0512] F. Nucleobase Sequence

[0513] In certain embodiments, oligonucleotides (unmodified or modified oligonucleotides) are further described by their nucleobase sequence. In certain embodiments oligonucleotides have a nucleobase sequence that is complementary to a second oligonucleotide or an identified reference nucleic acid, such as a target nucleic acid. In certain such embodiments, a region of an oligonucleotide has a nucleobase sequence that is complementary to a second oligonucleotide or an identified reference nucleic acid, such as a target nucleic acid. In certain embodiments, the nucleobase sequence of a region or entire length of an oligonucleotide is at least 50%, at least 60%, at least 70%, at least 80%, at least 85%, at least 90%, at least 95%, or 100% complementary to the second oligonucleotide or nucleic acid, such as a target nucleic acid.

### II. Certain Oligomeric Compounds

[0514] In certain embodiments, provided herein are oligomeric compounds, which consist of an oligonucleotide (modified or unmodified) and optionally one or more conjugate groups and/or terminal groups. Conjugate groups consist of one or more conjugate moiety and a conjugate linker which links the conjugate moiety to the oligonucleotide. Conjugate groups may be attached to either or both ends of an oligonucleotide and/or at any internal position. In certain embodiments, conjugate groups are attached to the 2′-position of a nucleoside of a modified oligonucleotide. In certain embodiments, conjugate groups that are attached to either or both ends of an oligonucleotide are terminal groups. In certain such embodiments, conjugate groups or terminal groups are attached at the 3′ and/or 5′-end of oligonucleotides. In certain such embodiments, conjugate groups (or terminal groups) are attached at the 3′-end of oligonucleotides. In certain embodiments, conjugate groups are attached near the 3′-end of oligonucleotides. In certain embodiments, conjugate groups (or terminal groups) are attached at the 5′-end of oligonucleotides. In certain embodiments, conjugate groups are attached near the 5′-end of oligonucleotides.

[0515] Examples of terminal groups include but are not limited to conjugate groups, capping groups, phosphate moieties, protecting groups, modified or unmodified nucleosides, and two or more nucleosides that are independently modified or unmodified.

[0516] A. Certain RNAi Compounds

[0517] RNAi compounds comprise an antisense RNAi oligonucleotide and optionally a sense RNAi oligonucleotide. RNAi compounds may also comprise terminal groups and/or conjugate groups which may be attached to the antisense RNAi oligonucleotide or the sense RNAi oligonucleotide (when present).

[0518] Duplexes

[0519] RNAi compounds comprising an antisense RNAi oligonucleotide and a sense RNAi oligonucleotide form a duplex, because the sense RNAi oligonucleotide comprises an antisense-hybridizing region that is complementary to the antisense RNAi oligonucleotide. In certain embodiments, each nucleobase of the antisense RNAi oligonucleotide and the sense RNAi oligonucleotide are complementary to one another. In certain embodiments, the two RNAi oligonucleotides have at least one mismatch relative to one another.

[0520] In certain embodiments, the antisense hybridizing region constitutes the entire length of the sense RNAi oligonucleotide and the antisense RNAi oligonucleotide. In certain embodiments, one or both of the antisense RNAi oligonucleotide and the sense RNAi oligonucleotide comprise additional nucleosides at one or both ends that do not hybridize (overhanging nucleosides). In certain embodiments, overhanging nucleosides are DNA. In certain embodiments, overhanging nucleosides are linked to each other (where there is more than one) and to the first non-overhanging nucleoside with phosphorothioate linkages.

[0521] B. Certain Conjugate Groups

[0522] In certain embodiments, oligonucleotides are covalently attached to one or more conjugate groups. In certain embodiments, conjugate groups modify one or more properties of the attached oligonucleotide, including but not limited to pharmacodynamics, pharmacokinetics, stability, binding, absorption, tissue distribution, cellular distribution, cellular uptake, charge and clearance.

[0523] In certain embodiments, conjugation of one or more carbohydrate moieties to a modified oligonucleotide can optimize one or more properties of the modified oligonucleotide. In certain embodiments, the carbohydrate moiety is attached to a modified subunit of the modified oligonucleotide. For example, the ribose sugar of one or more ribonucleotide subunits of a modified oligonucleotide can be replaced with another moiety, e.g. a non-carbohydrate (preferably cyclic) carrier to which is attached a carbohydrate ligand. A ribonucleotide subunit in which the ribose sugar of the subunit has been so replaced is referred to herein as a ribose replacement modification subunit (RRMS), which is a modified sugar moiety. A cyclic carrier may be a carbocyclic ring system, i.e., one or more ring atoms may be a heteroatom, e.g., nitrogen, oxygen, sulphur. The cyclic carrier may be a monocyclic ring system, or may contain two or more rings, e.g. fused rings. The cyclic carrier may be a fully saturated ring system, or it may contain one or more double bonds. In certain embodiments, the modified oligonucleotide is a gapmer. In certain embodiments, the modified oligonucleotide is an antisense RNAi oligonucleotide. In certain embodiments, the modified oligonucleotide is a sense RNAi oligonucleotide.

[0524] In certain embodiments, conjugate groups impart a new property on the attached oligonucleotide, e.g., fluorophores or reporter groups that enable detection of the oligonucleotide. Certain conjugate groups and conjugate moieties have been described previously, for example: cholesterol moiety (Letsinger et al., Proc. Natl. Acad. Sci. USA, 1989, 86, 6553-6556), cholic acid (Manoharan et al., Bioorg. Med. Chem. Lett., 1994, 4, 1053-1060), a thioether, e.g., hexyl-S-tritylthiol (Manoharan et al., Ann. N.Y. Acad. Sci., 1992, 660, 306-309; Manoharan et al., Bioorg. Med. Chem. Lett., 1993, 3, 2765-2770), a thiocholesterol (Oberhauser et al., Nucl. Acids Res., 1992, 20, 533-538), an aliphatic chain, e.g., do-decan-diol or undecyl residues (Saison-Behmoaras et al., EMBO J., 1991, 10, 1111-1118; Kabanov et al., FEBS Lett., 1990, 259, 327-330; Svinarchuk et al., Biochimie, 1993, 75, 49-54), a phospholipid, e.g., di-hexadecyl-rac-glycerol or triethyl-ammonium 1,2-di-O-hexadecyl-rac-glycero-3-H-phosphonate (Manoharan et al., Tetrahedron Lett., 1995, 36, 3651-3654; Shea et al., Nucl. Acids Res., 1990, 18, 3777-3783), a polyamine or a polyethylene glycol chain (Manoharan et al., Nucleosides & Nucleotides, 1995, 14, 969-973), or adamantane acetic acid a palmityl moiety (Mishra et al., Biochim. Biophys. Acta, 1995, 1264, 229-237), an octadecylamine or hexylamino-carbonyl-oxycholesterol moiety (Crooke et al., J. Pharmacol. Exp. Ther., 1996, 277, 923-937), a tocopherol group (Nishina et al., Molecular Therapy Nucleic Acids, 2015, 4, e220; and Nishina et al., Molecular Therapy, 2008, 16, 734-740), or a GalNAc cluster (e.g., WO2014/179620).

[0525] In certain embodiments, conjugate groups may be selected from any of a C22 alkyl, C20 alkyl, C16 alkyl, C10 alkyl, C21 alkyl, C19 alkyl, C18 alkyl, C15 alkyl, C14 alkyl, C13 alkyl, C12 alkyl, C11 alkyl, C9 alkyl, C8 alkyl, C7 alkyl, C6 alkyl, C5 alkyl, C22 alkenyl, C20 alkenyl, C16 alkenyl, C10 alkenyl, C21 alkenyl, C19 alkenyl, C18 alkenyl, C15 alkenyl, C14 alkenyl, C13 alkenyl, C12 alkenyl, C11 alkenyl, C9 alkenyl, C8 alkenyl, C7 alkenyl, C6 alkenyl, or C5 alkenyl.

[0526] In certain embodiments, conjugate groups may be selected from any of C22 alkyl, C20 alkyl, C16 alkyl, C10 alkyl, C21 alkyl, C19 alkyl, C18 alkyl, C15 alkyl, C14 alkyl, C13 alkyl, C12 alkyl, C11 alkyl, C9 alkyl, C8 alkyl, C7 alkyl, C6 alkyl, and C5 alkyl, where the alkyl chain has one or more unsaturated bonds.

[0527] 1. Conjugate Moieties

[0528] Conjugate moieties include, without limitation, intercalators, reporter molecules, polyamines, polyamides, peptides, carbohydrates (e.g., GalNAc), vitamin moieties, polyethylene glycols, thioethers, polyethers, cholesterols, thiocholesterols, cholic acid moieties, folate, lipids, phospholipids, biotin, phenazine, phenanthridine, anthraquinone, adamantane, acridine, fluoresceins, rhodamines, coumarins, fluorophores, and dyes.

[0529] In certain embodiments, a conjugate moiety comprises an active drug substance, for example, aspirin, warfarin, phenylbutazone, ibuprofen, suprofen, fen-bufen, ketoprofen, (S)-(+)-pranoprofen, carprofen, dansylsarcosine, 2,3,5-triiodobenzoic acid, fingolimod, flufenamic acid, folinic acid, a benzothiadiazide, chlorothiazide, a diazepine, indo-methicin, a barbiturate, a cephalosporin, a sulfa drug, an antidiabetic, an antibacterial or an antibiotic.

[0530] 2. Conjugate Linkers

[0531] Conjugate moieties are attached to oligonucleotides through conjugate linkers. In certain oligomeric compounds, the conjugate linker is a single chemical bond (i.e., the conjugate moiety is attached directly to an oligonucleotide through a single bond). In certain embodiments, the conjugate linker comprises a chain structure, such as a hydrocarbyl chain, or an oligomer of repeating units such as ethylene glycol, nucleosides, or amino acid units.

[0532] In certain embodiments, a conjugate linker comprises pyrrolidine.

[0533] In certain embodiments, a conjugate linker comprises one or more groups selected from alkyl, amino, oxo, amide, disulfide, polyethylene glycol, ether, thioether, and hydroxylamino. In certain such embodiments, the conjugate linker comprises groups selected from alkyl, amino, oxo, amide and ether groups. In certain embodiments, the conjugate linker comprises groups selected from alkyl and amide groups. In certain embodiments, the conjugate linker comprises groups selected from alkyl and ether groups. In certain embodiments, the conjugate linker comprises at least one phosphorus moiety. In certain embodiments, the conjugate linker comprises at least one phosphate group. In certain embodiments, the conjugate linker includes at least one neutral linking group.

[0534] In certain embodiments, conjugate linkers, including the conjugate linkers described above, are bifunctional linking moieties, e.g., those known in the art to be useful for attaching conjugate groups to compounds, such as the oligonucleotides provided herein. In general, a bifunctional linking moiety comprises at least two functional groups. One of the functional groups is selected to bind to a particular site on a compound and the other is selected to bind to a conjugate group. Examples of functional groups used in a bifunctional linking moiety include but are not limited to electrophiles for reacting with nucleophilic groups and nucleophiles for reacting with electrophilic groups. In certain embodiments, bifunctional linking moieties comprise one or more groups selected from amino, hydroxyl, carboxylic acid, thiol, alkyl, alkenyl, and alkynyl.

[0535] Examples of conjugate linkers include but are not limited to pyrrolidine, 8-amino-3,6-dioxaoctanoic acid (ADO), succinimidyl 4-(N-maleimidomethyl) cyclohexane-1-carboxylate (SMCC) and 6-aminohexanoic acid (AHEX or AHA). Other conjugate linkers include but are not limited to substituted or unsubstituted C₁-C₁₀ alkyl, substituted or unsubstituted C₂-C₁₀ alkenyl or substituted or unsubstituted C₂-C₁₀ alkynyl, wherein a nonlimiting list of preferred substituent groups includes hydroxyl, amino, alkoxy, carboxy, benzyl, phenyl, nitro, thiol, thioalkoxy, halogen, alkyl, aryl, alkenyl and alkynyl.

[0536] In certain embodiments, conjugate linkers comprise 1-10 linker-nucleosides. In certain embodiments, conjugate linkers comprise 2-5 linker-nucleosides. In certain embodiments, conjugate linkers comprise exactly 3 linker-nucleosides. In certain embodiments, conjugate linkers comprise the TCA motif. In certain embodiments, such linker-nucleosides are modified nucleosides. In certain embodiments such linker-nucleosides comprise a modified sugar moiety. In certain embodiments, linker-nucleosides are unmodified. In certain embodiments, linker-nucleosides comprise an optionally protected heterocyclic base selected from a purine, substituted purine, pyrimidine or substituted pyrimidine. In certain embodiments, a cleavable moiety is a nucleoside selected from uracil, thymine, cytosine, 4-N-benzoylcytosine, 5-methyl cytosine, 4-N-benzoyl-5-methyl cytosine, adenine, 6-N-benzoyladenine, guanine and 2-N-isobutyrylguanine. It is typically desirable for linker-nucleosides to be cleaved from the oligomeric compound after it reaches a target tissue. Accordingly, linker-nucleosides are typically linked to one another and to the remainder of the oligomeric compound through cleavable bonds. In certain embodiments, such cleavable bonds are phosphodiester bonds.

[0537] Herein, linker-nucleosides are not considered to be part of the oligonucleotide. Accordingly, in embodiments in which an oligomeric compound comprises an oligonucleotide consisting of a specified number or range of linked nucleosides and/or a specified percent complementarity to a reference nucleic acid and the oligomeric compound also comprises a conjugate group comprising a conjugate linker comprising linker-nucleosides, those linker-nucleosides are not counted toward the length of the oligonucleotide and are not used in determining the percent complementarity of the oligonucleotide for the reference nucleic acid. For example, an oligomeric compound may comprise (1) a modified oligonucleotide consisting of 8-30 nucleosides and (2) a conjugate group comprising 1-10 linker-nucleosides that are contiguous with the nucleosides of the modified oligonucleotide. The total number of contiguous linked nucleosides in such an oligomeric compound is more than 30. Alternatively, an oligomeric compound may comprise a modified oligonucleotide consisting of 8-30 nucleosides and no conjugate group. The total number of contiguous linked nucleosides in such an oligomeric compound is no more than 30. Unless otherwise indicated conjugate linkers comprise no more than 10 linker-nucleosides. In certain embodiments, conjugate linkers comprise no more than 5 linker-nucleosides. In certain embodiments, conjugate linkers comprise no more than 3 linker-nucleosides. In certain embodiments, conjugate linkers comprise no more than 2 linker-nucleosides. In certain embodiments, conjugate linkers comprise no more than 1 linker-nucleoside.

[0538] In certain embodiments, it is desirable for a conjugate group to be cleaved from the oligonucleotide. For example, in certain circumstances oligomeric compounds comprising a particular conjugate moiety are better taken up by a particular cell type, but once the oligomeric compound has been taken up, it is desirable that the conjugate group be cleaved to release the unconjugated or parent oligonucleotide. Thus, certain conjugate linkers may comprise one or more cleavable moieties. In certain embodiments, a cleavable moiety is a cleavable bond. In certain embodiments, a cleavable moiety is a group of atoms comprising at least one cleavable bond. In certain embodiments, a cleavable moiety comprises a group of atoms having one, two, three, four, or more than four cleavable bonds. In certain embodiments, a cleavable moiety is selectively cleaved inside a cell or subcellular compartment, such as a lysosome. In certain embodiments, a cleavable moiety is selectively cleaved by endogenous enzymes, such as nucleases.

[0539] In certain embodiments, a cleavable bond is selected from among: an amide, an ester, an ether, one or both esters of a phosphodiester, a phosphate ester, a carbamate, or a disulfide. In certain embodiments, a cleavable bond is one or both of the esters of a phosphodiester. In certain embodiments, a cleavable moiety comprises a phosphate or phosphodiester. In certain embodiments, the cleavable moiety is a phosphate linkage between an oligonucleotide and a conjugate moiety or conjugate group.

[0540] In certain embodiments, a cleavable moiety comprises or consists of one or more linker-nucleosides. In certain such embodiments, the one or more linker-nucleosides are linked to one another and/or to the remainder of the oligomeric compound through cleavable bonds. In certain embodiments, such cleavable bonds are unmodified phosphodiester bonds. In certain embodiments, a cleavable moiety is 2′-deoxynucleoside that is attached to either the 3′ or 5′-terminal nucleoside of an oligonucleotide by a phosphate internucleoside linkage and covalently attached to the remainder of the conjugate linker or conjugate moiety by a phosphate or phosphorothioate linkage. In certain such embodiments, the cleavable moiety is 2′-deoxyadenosine.

[0541] 3. Cell-Targeting Moieties

[0542] In certain embodiments, a conjugate group comprises a cell-targeting moiety. In certain embodiments, a conjugate group has the general formula:

[chemical structure]

[0543] wherein n is from 1 to about 3, m is 0 when n is 1, m is 1 when n is 2 or greater, j is 1 or 0, and k is 1 or 0.

[0544] In certain embodiments, n is 1, j is 1 and k is 0. In certain embodiments, n is 1, j is 0 and k is 1. In certain embodiments, n is 1, j is 1 and k is 1. In certain embodiments, n is 2, j is 1 and k is 0. In certain embodiments, n is 2, j is 0 and k is 1. In certain embodiments, n is 2, j is 1 and k is 1. In certain embodiments, n is 3, j is 1 and k is 0. In certain embodiments, n is 3, j is 0 and k is 1. In certain embodiments, n is 3, j is 1 and k is 1.

[0545] In certain embodiments, conjugate groups comprise cell-targeting moieties that have at least one tethered ligand. In certain embodiments, cell-targeting moieties comprise two tethered ligands covalently attached to a branching group. In certain embodiments, cell-targeting moieties comprise three tethered ligands covalently attached to a branching group.

[0546] In certain embodiments, each ligand of a cell-targeting moiety has an affinity for at least one type of receptor on a target cell. In certain embodiments, each ligand has an affinity for at least one type of receptor on the surface of a mammalian liver cell. In certain embodiments, each ligand has an affinity for the hepatic asialoglycoprotein receptor (ASGP-R). In certain embodiments, each ligand is a carbohydrate.

[0547] In certain embodiments, the cell-targeting moiety targets neurons. In certain embodiments, the cell-targeting moiety targets a neurotransmitter receptor. In certain embodiments, the cell targeting moiety targets a neurotransmitter transporter. In certain embodiments, the cell targeting moiety targets a GABA transporter. See e.g., WO 2011/131693, WO 2014/064257.

[0548] C. Certain Terminal Groups

[0549] In certain embodiments, oligomeric compounds comprise one or more terminal groups. In certain such embodiments, modified oligonucleotides comprise a phosphorus-containing group at the 5′-end of the modified oligonucleotide. In certain embodiments, the phosphorus-containing group is at the 5′-end of the antisense RNAi oligonucleotide and/or the sense RNAi oligonucleotide. In certain embodiments, the terminal group is a phosphate stabilized phosphate group. The 5′-end phosphorus-containing group can be 5′-end phosphate (5′-P), 5′-end phosphorothioate (5′-PS), 5′-end phosphorodithioate (5′-PS₂), 5′-end vinylphosphonate (5′-VP), 5′-end methylphosphonate (MePhos) or 5′-deoxy-5′-C-malonyl. When the 5′-end phosphorus-containing group is 5′-end vinylphosphonate, the 5′VP can be either 5′-E-VP isomer (i.e., trans-vinylphosphonate), 5′-Z-VP isomer (i.e., cis-vinylphosphonate), or mixtures thereof. Although such phosphate group can be attached to any modified oligonucleotide, it has particularly been shown that attachment of such a group to an antisense RNAi oligonucleotide improves activity of certain RNAi compounds. See, e.g., Prakash et al., Nucleic Acids Res., 43(6):2993-3011, 2015; Elkayam, et al., Nucleic Acids Res., 45(6):3528-3536, 2017; Parmar, et al. ChemBioChem, 17(11)985-989; 2016; Harastzi, et al., Nucleic Acids Res., 45(13):7581-7592, 2017. In certain embodiments, the phosphate stabilizing group is 5′-cyclopropyl phosphonate. See e.g., WO/2018/027106.

[0550] In certain embodiments, terminal groups comprise one or more abasic nucleosides and/or inverted nucleosides. In certain embodiments, terminal groups comprise one or more 2′-linked nucleosides. In certain such embodiments, the 2′-linked nucleoside is an abasic nucleoside.

[0551] D. Certain Specific RNAi Motifs

[0552] RNAi compounds can be described by motif or by specific features.

[0553] In certain embodiments, the RNAi compounds described herein comprise:
[0554] (a) a sense RNAi oligonucleotide having:
   [0555] (i) a length of 21 nucleotides;
   [0556] (ii) a conjugate attached to the 3′-end; and
   [0557] (iii) 2′-F modifications at positions 1, 3, 5, 7, 9 to 11, 13, 17, 19, and 21, and 2′-OMe modifications at positions 2, 4, 6, 8, 12, 14 to 16, 18, and 20 (counting from the 5′ end); and
[0558] (b) an antisense RNAi oligonucleotide having:
   [0559] (i) a length of 23 nucleotides;
   [0560] (ii) 2′-OMe modifications at positions 1, 3, 5, 9, 11 to 13, 15, 17, 19, 21, and 23, and 2′F modifications at positions 2, 4, 6 to 8, 10, 14, 16, 18, 20, and 22 (counting from the 5′ end); and
   [0561] (iii) phosphorothioate internucleoside linkages between nucleoside positions 21 and 22, and between nucleoside positions 22 and 23 (counting from the 5′ end);
   [0562] wherein the two nucleotides at the 3′end of the antisense RNAi oligonucleotide are overhanging nucleosides, and the end of the RNAi compound duplex constituting the 5′-end of the antisense RNAi oligonucleotide and the 3′-end of the sense RNAi oligonucleotide is blunt (i.e., neither oligonucleotide has overhang nucleoside at that end and instead the hybridizing region of the sense RNAi oligonucleotide includes the 3′-most nucleoside of the sense RNAi oligonucleotide and that nucleoside hybridizes with the 5′-most nucleoside of the antisense oligonucleotide).

[0563] In certain embodiments, the RNAi compounds described herein comprise:
[0564] (a) a sense RNAi oligonucleotide having:
   [0565] (i) a length of 21 nucleotides;
   [0566] (ii) a conjugate attached to the 3′-end;
   [0567] (iii) 2′-F modifications at positions 1, 3, 5, 7, 9 to 11, 13, 17, 19, and 21, and 2′-OMe modifications at positions 2, 4, 6, 8, 12, 14, 16, 18, and 20 (counting from the 5′ end); and
   [0568] (iv) phosphorothioate internucleoside linkages between nucleoside positions 1 and 2, and between nucleoside positions 2 and 3 (counting from the 5′ end);
[0569] and
[0570] (b) an antisense RNAi oligonucleotide having:
   [0571] (i) a length of 23 nucleotides;
   [0572] (ii) 2′-OMe modifications at positions 1, 3, 5, 7, 9, 11 to 13, 15, 17, 19, and 21 to 23, and 2′F modifications at positions 2, 4, 6, 8, 10, 14, 16, 18, and 20 (counting from the 5′ end); and
   [0573] (iii) phosphorothioate internucleoside linkages between nucleoside positions 1 and 2, between nucleoside positions 2 and 3, between nucleoside positions 21 and 22, and between nucleoside positions 22 and 23 (counting from the 5′ end);
   [0574] wherein the RNAi duplex includes a two nucleotide overhang at the 3′end of the antisense RNAi oligonucleotide, and a blunt end at the 5′-end of the antisense RNAi oligonucleotide.

[0575] In certain embodiments, the RNAi compounds described herein comprise:
[0576] (a) a sense RNAi oligonucleotide having:
   [0577] (i) a length of 21 nucleotides;
   [0578] (ii) a conjugate attached to the 3′-end;
   [0579] (iii) 2′-OMe modifications at positions 1 to 6, 8, 10, and 12 to 21, and 2′-F modifications at positions 7 and 9, and a deoxynucleotide at position 11 (counting from the 5′ end); and
   [0580] (iv) phosphorothioate internucleoside linkages between nucleoside positions 1 and 2, and between nucleoside positions 2 and 3 (counting from the 5′ end);
[0581] and
[0582] (b) an antisense RNAi oligonucleotide having:
   [0583] (i) a length of 23 nucleotides;
   [0584] (ii) 2′-OMe modifications at positions 1, 3, 7, 9, 11, 13, 15, 17, and 19 to 23, and 2′F modifications at positions 2, 4 to 6, 8, 10, 12, 14, 16, and 18 (counting from the 5′ end); and
   [0585] (iii) phosphorothioate internucleoside linkages between nucleoside positions 1 and 2, between nucleoside positions 2 and 3, between nucleoside positions 21 and 22, and between nucleoside positions 22 and 23 (counting from the 5′ end);
   [0586] wherein the RNAi duplex has a two nucleotide overhang at the 3′end of the antisense RNAi oligonucleotide, and a blunt end at the 5′-end of the antisense RNAi oligonucleotide.

[0587] In certain embodiments, the RNAi compounds described herein comprise:
[0588] (a) a sense RNAi oligonucleotide having:
   [0589] (i) a length of 21 nucleotides;
   [0590] (ii) a conjugate attached to the 3′-end;
   [0591] (iii) 2′-OMe modifications at positions 1 to 6, 8, and 12 to 21, and 2′-F modifications at positions 7, and 9 to 11; and
   [0592] (iv) phosphorothioate internucleoside linkages between nucleoside positions 1 and 2, and between nucleoside positions 2 and 3 (counting from the 5′ end);
[0593] and
[0594] (b) an antisense RNAi oligonucleotide having:
   [0595] (i) a length of 23 nucleotides;
   [0596] (ii) 2′-OMe modifications at positions 1, 3 to 5, 7, 8, 10 to 13, 15, and 17 to 23, and 2′F modifications at positions 2, 6, 9, 14, and 16 (counting from the 5′ end); and
   [0597] (iii) phosphorothioate internucleoside linkages between nucleoside positions 1 and 2, between nucleoside positions 2 and 3, between nucleoside positions 21 and 22, and between nucleoside positions 22 and 23 (counting from the 5′ end);
   [0598] wherein the RNAi duplex has a two nucleotide overhang at the 3′end of the antisense RNAi oligonucleotide, and a blunt end at the 5′-end of the antisense RNAi oligonucleotide.

[0599] In certain embodiments, the RNAi compounds described herein comprise:
[0600] (a) a sense RNAi oligonucleotide having:
   [0601] (i) a length of 21 nucleotides;
   [0602] (ii) a conjugate attached to the 3′-end;
   [0603] (iii) 2′-OMe modifications at positions 1 to 6, 8, and 12 to 21, and 2′-F modifications at positions 7, and 9 to 11; and
   [0604] (iv) phosphorothioate internucleoside linkages between nucleoside positions 1 and 2, and between nucleoside positions 2 and 3 (counting from the 5′ end);
[0605] and
[0606] (b) an antisense RNAi oligonucleotide having:
   [0607] (i) a length of 23 nucleotides;
   [0608] (ii) 2′-OMe modifications at positions 1, 3 to 5, 7, 10 to 13, 15, and 17 to 23, and 2′F modifications at positions 2, 6, 8, 9, 14, and 16 (counting from the 5′ end); and
   [0609] (iii) phosphorothioate internucleoside linkages between nucleoside positions 1 and 2, between nucleoside positions 2 and 3, between nucleoside positions 21 and 22, and between nucleoside positions 22 and 23 (counting from the 5′ end);
[0610] wherein the RNAi duplex has a two nucleotide overhang at the 3′end of the antisense RNAi oligonucleotide, and a blunt end at the 5′-end of the antisense RNAi oligonucleotide.
   [0611] In certain embodiments, the RNAi compounds described herein comprise:
[0612] (a) a sense RNAi oligonucleotide having:
   [0613] (i) a length of 19 nucleotides;
   [0614] (ii) a conjugate attached to the 3′-end;
   [0615] (iii) 2′-OMe modifications at positions 1 to 4, 6, and 10 to 19, and 2′-F modifications at positions 5, and 7 to 9; and
   [0616] (iv) phosphorothioate internucleoside linkages between nucleoside positions 1 and 2, and between nucleoside positions 2 and 3 (counting from the 5′ end);
[0617] and
[0618] (b) an antisense RNAi oligonucleotide having:
   [0619] (i) a length of 21 nucleotides;
   [0620] (ii) 2′-OMe modifications at positions 1, 3 to 5, 7, 10 to 13, 15, and 17 to 21, and 2′F modifications at positions 2, 6, 8, 9, 14, and 16 (counting from the 5′ end); and
   [0621] (iii) phosphorothioate internucleoside linkages between nucleoside positions 1 and 2, between nucleoside positions 2 and 3, between nucleoside positions 19 and 20, and between nucleoside positions 20 and 21 (counting from the 5′ end);
   [0622] wherein the RNAi duplex has a two nucleotide overhang at the 3′end of the antisense RNAi oligonucleotide, and a blunt end at the 5′-end of the antisense RNAi oligonucleotide.

[0623] In certain embodiments, the RNAi compounds described herein comprise:
[0624] (a) a sense RNAi oligonucleotide having:
   [0625] (i) a length of 21 nucleotides;
   [0626] (ii) a conjugate attached at position 6 (counting from the 5′ end);
   [0627] (iii) 2′-F modifications at positions 7 and 9 to 11, and 2′-OMe modifications at positions 1 to 5, 8, and 12 to 21 (counting from the 5′ end); and
   [0628] (iv) phosphorothioate internucleoside linkages between nucleoside positions 1 and 2, between nucleoside positions 2 and 3, between nucleoside positions 19 and 20, and between nucleoside positions 20 and 21 (counting from the 5′ end);
[0629] and
[0630] (b) an antisense RNAi oligonucleotide having:
   [0631] (i) a length of 23 nucleotides;
   [0632] (ii) 2′-OMe modifications at positions 1, 3 to 5, 7, 10 to 13, 15, and 17 to 23, and 2′F modifications at positions 2, 6, 8, 9, 14, and 16 (counting from the 5′ end);
   [0633] (iii) phosphorothioate internucleoside linkages between nucleoside positions 1 and 2, between nucleoside positions 2 and 3, between nucleoside positions 21 and 22, and between nucleoside positions 22 and 23 (counting from the 5′ end); and
   [0634] (iv) a stabilized phosphate group attached to the 5′ position of the 5′-most nucleoside;
   [0635] wherein the RNAi duplex includes a two nucleotide overhang at the 3′end of the antisense RNAi oligonucleotide, and a blunt end at the 5′-end of the antisense RNAi oligonucleotide.

[0636] In certain embodiments, the RNAi compounds described herein comprise:
[0637] (a) a sense RNAi oligonucleotide having:
   [0638] (i) a length of 21 nucleotides;
   [0639] (ii) a conjugate attached to the 3′-end;
   [0640] (iii) 2′-F modifications at positions 7 and 9 to 11, and 2′-OMe modifications at positions 1 to 6, 8, and 12 to 21 (counting from the 5′ end);
   [0641] (iv) phosphorothioate internucleoside linkages between nucleoside positions 1 and 2 and between nucleoside positions 2 and 3 (counting from the 5′ end);
[0642] and
[0643] (b) an antisense RNAi oligonucleotide having:
   [0644] (i) a length of 23 nucleotides;
   [0645] (ii) 2′-OMe modifications at positions 1, 3 to 5, 7 to 13, 15, and 17 to 23 an (S)-GNA modification at position 6, and 2′F modifications at positions 2, 14, and 16 (counting from the 5′ end); and
   [0646] (iii) phosphorothioate internucleoside linkages between nucleoside positions 1 and 2, between nucleoside positions 2 and 3, between nucleoside positions 21 and 22, and between nucleoside positions 22 and 23 (counting from the 5′ end);
   [0647] wherein the RNAi duplex includes a two nucleotide overhang at the 3′end of the antisense RNAi oligonucleotide, and a blunt end at the 5′-end of the antisense RNAi oligonucleotide.

[0648] In certain embodiments, the RNAi compounds described herein comprise:
[0649] (a) a sense RNAi oligonucleotide having:
   [0650] (i) a length of 21 nucleotides;
   [0651] (ii) a conjugate attached to the 3′-end;
   [0652] (iii) 2′-F modifications at positions 7 and 9 to 11, and 2′-OMe modifications at positions 1 to 6, 8, and 12 to 21 (counting from the 5′ end);
   [0653] (iv) phosphorothioate internucleoside linkages between nucleoside positions 1 and 2 and between nucleoside positions 2 and 3 (counting from the 5′ end);
[0654] and
[0655] (b) an antisense RNAi oligonucleotide having:
   [0656] (i) a length of 23 nucleotides;
   [0657] (ii) 2′-OMe modifications at positions 1, 3 to 6, 8 to 13, 15, and 17 to 23 an (S)-GNA modification at position 7, and 2′F modifications at positions 2, 14, and 16 (counting from the 5′ end); and
   [0658] (iii) phosphorothioate internucleoside linkages between nucleoside positions 1 and 2, between nucleoside positions 2 and 3, between nucleoside positions 21 and 22, and between nucleoside positions 22 and 23 (counting from the 5′ end);
   [0659] wherein the RNAi duplex includes a two nucleotide overhang at the 3′end of the antisense RNAi oligonucleotide, and a blunt end at the 5′-end of the antisense RNAi oligonucleotide.

[0660] In certain embodiments, the RNAi compounds described herein comprise:
[0661] (a) a sense RNAi oligonucleotide having:
   [0662] (i) a length of 21 nucleotides;
   [0663] (ii) a conjugate attached at position 6 (counting from the 5′ end); and
   [0664] (iii) 2′-F modifications at positions 7 and 9 to 11, and 2′-OMe modifications at positions 1 to 5, 8, and 12 to 21 (counting from the 5′ end);
   [0665] (iv) phosphorothioate internucleoside linkages between nucleoside positions 1 and 2, between nucleoside positions 2 and 3, between nucleoside positions 19 and 20, and between nucleoside positions 20 and 21 (counting from the 5′ end);
[0666] and
[0667] (b) an antisense RNAi oligonucleotide having:
   [0668] (i) a length of 23 nucleotides;
   [0669] (ii) 2′-OMe modifications at positions 1, 3 to 5, 7 to 13, 15, and 17 to 23 an (S)-GNA modification at position 6, and 2′F modifications at positions 2, 14, and 16 (counting from the 5′ end);

[0670] (iii) phosphorothioate internucleoside linkages between nucleoside positions 1 and 2, between nucleoside positions 2 and 3, between nucleoside positions 21 and 22, and between nucleoside positions 22 and 23 (counting from the 5′ end); and

[0671] (iv) a stabilized phosphate group attached to the 5′ position of the 5′-most nucleoside; wherein the RNAi duplex includes a two nucleotide overhang at the 3′end of the antisense RNAi oligonucleotide, and a blunt end at the 5′-end of the antisense RNAi oligonucleotide.

[0672] In certain embodiments, the RNAi compounds described herein comprise:
[0673] (a) a sense RNAi oligonucleotide having:
   [0674] (i) a length of 21 nucleotides;
   [0675] (ii) a conjugate attached at position 6 (counting from the 5′ end);
   [0676] (iii) 2′-F modifications at positions 7 and 9 to 11, and 2′-OMe modifications at positions 1 to 5, 8, and 12 to 21 (counting from the 5′ end); and
   [0677] (iv) phosphorothioate internucleoside linkages between nucleoside positions 1 and 2, between nucleoside positions 2 and 3, between nucleoside positions 19 and 20, and between nucleoside positions 20 and 21 (counting from the 5′ end);
[0678] and
[0679] (b) an antisense RNAi oligonucleotide having:
   [0680] (i) a length of 23 nucleotides;
   [0681] (ii) 2′-OMe modifications at positions 1, 3 to 6, 8 to 13, 15, and 17 to 23 an (S)-GNA modification at position 7, and 2′F modifications at positions 2, 14, and 16 (counting from the 5′ end);
   [0682] (iii) phosphorothioate internucleoside linkages between nucleoside positions 1 and 2, between nucleoside positions 2 and 3, between nucleoside positions 21 and 22, and between nucleoside positions 22 and 23 (counting from the 5′ end); and
   [0683] (iv) a stabilized phosphate group attached to the 5′ position of the 5′-most nucleoside;
   [0684] wherein the two nucleotides at the 3′end of the antisense RNAi oligonucleotide are overhanging nucleosides, and the end of the RNAi compound duplex constituting the 5′-end of the antisense RNAi oligonucleotide and the 3′-end of the sense RNAi oligonucleotide is blunt (i.e., neither oligonucleotide has overhang nucleoside at that end and instead the hybridizing region of the sense RNAi oligonucleotide includes the 3′-most nucleoside of the sense RNAi oligonucleotide and that nucleoside hybridizes with the 5′-most nucleoside of the antisense oligonucleotide).

[0685] In certain embodiments, the RNAi compounds described herein comprise:
[0686] (a) a sense RNAi oligonucleotide having:
   [0687] (i) a length of 21 nucleotides;
   [0688] (ii) a conjugate attached to the 5′-end;
   [0689] (iii) 2′-OMe modifications at positions 1 to 8, and 12 to 21, and 2′-F modifications at positions 9 to 11; and
   [0690] (iv) inverted abasic sugar moieties attached to both the 5′-most and 3′-most nucleosides;
[0691] and
[0692] (b) an antisense RNAi oligonucleotide having:
   [0693] (i) a length of 21 nucleotides;
   [0694] (ii) 2′-OMe modifications at positions 1, 3, 5, 7, 9, 11, 13, 15, 17, 19, and 21, and 2′F modifications at positions 2, 4, 6, 8, 10, 12, 14, 16, 18, and 20 (counting from the 5′ end); and
   [0695] (iii) phosphorothioate internucleoside linkages between nucleoside positions 1 and 2, between nucleoside positions 2 and 3, between nucleoside positions 3 and 4, and between nucleoside positions 20 and 21 (counting from the 5′ end).

[0696] In certain embodiments, the RNAi compounds described herein comprise:
[0697] (a) a sense RNAi oligonucleotide having:
   [0698] (i) a length of 21 nucleotides;
   [0699] (ii) a conjugate attached to the 5′-end;
   [0700] (iii) 2′-OMe modifications at positions 1 to 8, and 12 to 21, and 2′-F modifications at positions 9 to 11;
   [0701] (iv) a phosphorothioate internucleoside linkage between nucleoside positions 1 and 2 (counting from the 5′ end); and
   [0702] (v) an inverted abasic sugar moiety attached to the 3′-most nucleoside;
[0703] and
[0704] (b) an antisense RNAi oligonucleotide having:
   [0705] (i) a length of 21 nucleotides;
   [0706] (ii) 2′-OMe modifications at positions 1, 3, 5, 7, 9, 11, 13, 15, 17, 19, and 21, and 2′F modifications at positions 2, 4, 6, 8, 10, 12, 14, 16, 18, and 20 (counting from the 5′ end); and
   [0707] (iii) phosphorothioate internucleoside linkages between nucleoside positions 1 and 2, between nucleoside positions 2 and 3, between nucleoside positions 3 and 4, and between nucleoside positions 20 and 21 (counting from the 5′ end).

[0708] In certain embodiments, the RNAi compounds described herein comprise:
[0709] (a) a sense RNAi oligonucleotide having:
   [0710] (i) a length of 19 nucleotides;
   [0711] (ii) a conjugate attached to the 5′-end;
   [0712] (iii) 2′-OMe modifications at positions 2, 4, 6, 8, 10, 12, 14, 16, 18, and 20, and 2′-F modifications at positions 1, 3, 5, 7, 9, 11, 13, 15, 17, 19, and 21; and
   [0713] (iv) phosphorothioate internucleoside linkages between nucleoside positions 17 and 18, and between nucleoside positions 18 and 19 (counting from the 5′ end);
[0714] and
[0715] (b) an antisense RNAi oligonucleotide having:
   [0716] (i) a length of 19 nucleotides;
   [0717] (ii) 2′-OMe modifications at positions 1, 3, 5, 7, 9, 11, 13, 15, 17, 19, and 21, and 2′F modifications at positions 2, 4, 6, 8, 10, 12, 14, 16, 18, and 20 (counting from the 5′ end); and
   [0718] (iii) phosphorothioate internucleoside linkages between nucleoside positions 1 and 2, between nucleoside positions 2 and 3, between nucleoside positions 17 and 18, and between nucleoside positions 18 and 19 (counting from the 5′ end).

[0719] In any of the above embodiments, the conjugate at the 3′-end of the sense RNAi oligonucleotide may comprise a targeting moiety. In certain such embodiments, the targeting moiety targets a neurotransmitter receptor. In certain embodiments, the cell targeting moiety targets a neurotransmitter transporter. In certain embodiments, the cell targeting moiety targets a GABA transporter. See e.g., WO 2011/131693, WO 2014/064257.

[0720] In certain embodiments, the RNAi compound comprises a 21 nucleotide sense RNAi oligonucleotide and a 23 nucleotide antisense RNAi oligonucleotide, wherein the sense RNAi oligonucleotide contains at least one motif of three contiguous 2′-F modified nucleosides at positions 9, 10, 11 from the 5′-end; the antisense RNAi oligonucleotide contains at least one motif of three 2′-O-methyl modifications on three consecutive nucleotides at positions 11, 12, 13 from the 5′ end, wherein one end of the RNAi compound is blunt, while the other end comprises a 2 nucleotide overhang. Preferably, the 2 nucleotide overhang is at the 3′-end of the antisense RNAi oligonucleotide.

[0721] In certain embodiments, when the 2 nucleotide overhang is at the 3′-end of the antisense RNAi oligonucleotide, there may be two phosphorothioate internucleoside linkages between the terminal three nucleotides, wherein two of the three nucleotides are the overhang nucleotides, and the third nucleotide is a paired nucleotide next to the overhang nucleotide. In certain embodiments, the RNAi compound additionally has two phosphorothioate internucleoside linkages between the terminal three nucleotides at both the 5′-end of the sense RNAi oligonucleotide and at the 5′-end of the antisense RNAi oligonucleotide. In certain embodiments, every nucleotide in the sense RNAi oligonucleotide and the antisense RNAi oligonucleotide of the RNAi compound is a modified nucleotide. In certain embodiments, each nucleotide is independently modified with a 2′-O-methyl or 3′-fluoro, e.g. in an alternating motif. Optionally, the RNAi compound comprises a conjugate.

[0722] In certain embodiments, every nucleotide in the sense RNAi oligonucleotide and antisense RNAi oligonucleotide of the RNAi compound, including the nucleotides that are part of the motifs, may be modified. Each nucleotide may be modified with the same or different modification, which can include one or more alteration of one or both of the non-linking phosphate oxygens; alteration of a constituent of the ribose sugar, e.g., of the 2′ hydroxyl on the ribose sugar; wholesale replacement of the phosphate moiety with “dephospho” linkers; modification or replacement of a naturally occurring base; and replacement or modification of the ribose-phosphate backbone.

[0723] In certain embodiments, each nucleoside of the sense RNAi oligonucleotide and antisense RNAi oligonucleotide is independently modified with LNA, cEt, UNA, HNA, CeNA, 2′-MOE, 2′-OMe, 2′-O-allyl, 2′-C-allyl, 2′-deoxy, 2′-hydroxyl, or 2′-fluoro. The RNAi compound can contain more than one modification. In one embodiment, each nucleoside of the sense RNAi oligonucleotide and antisense RNAi oligonucleotide is independently modified with 2′-O-methyl or 2′-F. In certain embodiments, the modification is a 2′-NMA modification.

[0724] The term “alternating motif” as used herein refers to a motif having one or more modifications, each modification occurring on alternating nucleotides of one RNAi oligonucleotide. The alternating nucleotide may refer to one per every other nucleotide or one per every three nucleotides, or a similar pattern. For example, if A, B and C each represent one type of modification to the nucleotide, the alternating motif can be “ABABABABABAB . . . ,” “AABBAABBAABB . . . ,” “AABAABAABAAB . . . ,” “AAABAAABAAAB . . . ,” “AAABBBAAABBB . . . ,” or “ABCABCABCABC . . . ,” etc.

[0725] The type of modifications contained in the alternating motif may be the same or different. For example, if A, B, C, D each represent one type of modification on the nucleotide, the alternating pattern, i.e., modifications on every other nucleotide, may be the same, but each of the sense RNAi oligonucleotide or antisense RNAi oligonucleotide can be selected from several possibilities of modifications within the alternating motif such as “ABABAB . . . ”, “ACACAC . . . ” “BDBDBD . . . ” or “CDCDCD . . . ,” etc.

[0726] In certain embodiments, the modification pattern for the alternating motif on the sense RNAi oligonucleotide relative to the modification pattern for the alternating motif on the antisense RNAi oligonucleotide is shifted. The shift may be such that the group of modified nucleotides of the sense RNAi oligonucleotide corresponds to a group of differently modified nucleotides of the antisense RNAi oligonucleotide and vice versa. For example, the sense RNAi oligonucleotide when paired with the antisense RNAi oligonucleotide in the RNAi duplex, the alternating motif in the sense RNAi oligonucleotide may start with “ABABAB” from 5′-3′ of the RNAi oligonucleotide and the alternating motif in the antisense RNAi oligonucleotide may start with “BABABA” from 5′-3 ‘of the RNAi oligonucleotide within the duplex region. As another example, the alternating motif in the sense RNAi oligonucleotide may start with “AABBAABB” from 5’-3′ of the RNAi oligonucleotide and the alternating motif in the antisense RNAi oligonucleotide may start with “BBAABBAA” from 5′-3′ of the RNAi oligonucleotide within the duplex region, so that there is a complete or partial shift of the modification 10 patterns between the sense RNAi oligonucleotide and the antisense RNAi oligonucleotide.

[0727] In certain embodiments, the RNAi compound comprising the pattern of the alternating motif of 2′-O-methyl modification and 2′-F modification on the sense RNAi oligonucleotide initially has a shift relative to the pattern of the alternating motif of 2′-O-methyl modification and 2′-F modification on the antisense RNAi oligonucleotide initially, i.e., the 2′-O-methyl modified nucleotide on the sense RNAi oligonucleotide base pairs with a 2′-F modified nucleotides on the antisense RNAi oligonucleotide and vice versa. The 1 position of the sense RNAi oligonucleotide may start with the 2′-F modification, and the 1 position of the antisense RNAi oligonucleotide may start with a 2′-O-methyl modification.

[0728] The introduction of one or more motifs of three identical modifications on three consecutive nucleotides to the sense RNAi oligonucleotide and/or antisense RNAi oligonucleotide interrupts the initial modification pattern present in the sense RNAi oligonucleotide and/or antisense RNAi oligonucleotide. This interruption of the modification pattern of the sense and/or antisense RNAi oligonucleotide by introducing one or more motifs of three identical modifications on three consecutive nucleotides to the sense and/or antisense RNAi oligonucleotide surprisingly enhances the gene silencing activity to the target gene. In one embodiment, when the motif of three identical modifications on three consecutive 25 nucleotides is introduced to any of the RNAi oligonucleotide s, the modification of the nucleotide next to the motif is a different modification than the modification of the motif. For example, the portion of the sequence containing the motif is “ . . . NaYYYNb . . . ,” where “Y” represents the modification of the motif of three identical modifications on three consecutive nucleotide, and “Na” and “Nb” represent a modification to the nucleotide next to the motif “YYY” that is different than the modification of Y, and where Na and Nb can be the same or different modifications. Alternatively, Na and/or Nb may be present or absent when there is a wing modification present.

[0729] In certain embodiments, the sense RNAi oligonucleotide may be represented by formula (I):

5′nₚ-Nₐ—(X X X)i-N_{b}—Y Y Y—N_{b}—(Z Z Z)ᵣNₐ-n_{q}3′ (I)

[0730] wherein:

[0731] i and j are each independently 0 or 1;

[0732] p and q are each independently 0-6;

[0733] each Nₐ independently represents 0-25 linked nucleosides comprising at least two differently modified nucleosides;

[0734] each N_{b} independently represents 0-10 linked nucleosides;

[0735] each nₚ and n_{q} independently represent an overhanging nucleoside;

[0736] wherein N_{b} and Y do not have the same modification; and

[0737] XXX, YYY and ZZZ each independently represent modified nucleosides where each X nucleoside has the same modification; each Y nucleoside has the same modification; and each Z nucleoside has the same modification. In certain embodiments, each Y comprises a 2′-F modification.

[0738] In certain embodiments, the Nₐ and N_{b} comprise modifications of alternating patterns.

[0739] In certain embodiments, the YYY motif occurs at or near the cleavage site of the target nucleic acid. For example, when the RNAi compound has a duplex region of 17-23 nucleotides in length, the YYY motif can occur at or near the vicinity of the cleavage site (e.g., can occur at positions 6, 7, 8; 7, 8, 9; 8, 9, 10; 9, 10, 11; 10, 11, 12; or 11, 12, 13) of the sense RNAi oligonucleotide, the count starting from the 1^{st} nucleotide from the 5′-end; or optionally, the count starting at the 1^{st} paired nucleotide within the duplex region, from the 5′-end.

[0740] In certain embodiments, the antisense RNAi oligonucleotide of the RNAi may be represented by the formula:

5′n_{q}-Nₐ′—(Z′Z′Z′)ₖ—N_{b}′—Y′Y′Y′—N_{b}′—(X′X′X′)ₗ—N′ₐ-nₚ3′ (II)

[0741] wherein:

[0742] k and l are each independently 0 or 1;

[0743] p′ and q′ are each independently 0-6;

[0744] each Nₐ′ independently represents 0-25 linked nucleotides comprising at least two differently modified nucleotides;

[0745] each N_{b}′ independently represents 0-10 linked nucleotides;

[0746] each nₚ′ and n_{q}′ independently represent an overhanging nucleoside;

[0747] wherein N_{b}′ and Y′ do not have the same modification; and

[0748] X′X′X′, Y′Y′Y′ and Z′Z′Z′ each independently represent modified nucleosides where each X′ nucleoside has the same modification; each Y′ nucleoside has the same modification; and each Z′ nucleoside has the same modification. In certain embodiments, each Y′ comprises a 2′-F modification. In certain embodiments, each Y′ comprises a 2′-OMe modification.

[0749] In certain embodiments, the Nₐ′ and/or N_{b}′ comprise modifications of alternating patterns.

[0750] In certain embodiments, the Y′Y′Y′ motif occurs at or near the cleavage site of the target nucleic acid. For example, when the RNAi compound has a duplex region of 17-23 nucleotides in length, the Y′Y′Y′ motif can occur at positions 9, 10, 11; 10, 11, 12; 11, 12, 13; 12, 13, 14; or 13, 14, 15 of the antisense RNAi oligonucleotide, with the count starting from the 1^{st} nucleotide from the 5′-end; or, optionally, the count starting at the 1^{st} paired nucleotide within the duplex region, from the 5′-end. Preferably, the Y′Y′Y′ motif occurs at positions 11, 12, 13.

[0751] In certain embodiments, k is 1 and 1 is 0, or k is 0 and 1 is 1, or both k and l are 1.

[0752] The antisense RNAi oligonucleotide can therefore be represented by the following formulas:

5′n_{g}′-Nₐ′—Z′Z′Z′—N_{b}′—Y′Y′Y′—Nₐ′-nₚ′3′ (IIb);

5′ n_{g}′-Nₐ′—Y′Y′Y′—N_{b}′—X′ X′X′-nₚ′3′ (IIc); or

5′ n_{g}′-Na— Z′Z′Z′—N_{b}′—Y′Y′Y′—N_{b}′— X′X′X′—Nₐ′-nₚ′3′ (IId).

[0753] When the antisense RNAi oligonucleotide is represented by formula IIb, N_{b}′ represents 0-10, 0-7, 0-5, 0-4, 0-2, or 0 linked nucleosides. Each Nₐ′ independently represents 2-20, 2-15, or 2-10 linked nucleosides.

[0754] When the antisense RNAi oligonucleotide is represented by formula IIc, N_{b}′ represents 0-10, 0-7, 0-5, 0-4, 0-2, or 0 linked nucleosides. Each Nₐ′ independently represents 2-20, 2-15, or 2-10 linked nucleosides.

[0755] When the antisense RNAi oligonucleotide is represented by formula IId, N_{b}′ represents 0-10, 0-7, 0-5, 0-4, 0-2, or 0 linked nucleosides. Each Nₐ′ independently represents 2-20, 2-15, or 2-10 linked nucleosides.

[0756] Preferably, N_{b}′ is 0, 1, 2, 3, 4, 5, or 6.

[0757] In certain embodiments, k is 0 and 1 is 0 and the antisense RNAi oligonucleotide may be represented by the formula:

5′ nₚ′-Na′—Y′Y′Y′—Nₐ′-n_{q}′3′ (Ia).

[0758] When the antisense RNAi oligonucleotide is represented by formula IIa, each Nₐ′ independently represents 2-20, 2-15, or 2-10 linked nucleosides.

[0759] Each X′, Y′, and Z′ may be the same or different from each other.

[0760] Each nucleotide of the sense RNAi oligonucleotide and antisense RNAi oligonucleotide may be independently modified with LNA, UNA, cEt, HNA, CeNA, 2′-methoxyethyl, 2′-O-methyl, 2′-O-allyl, 2′-C-allyl, 2′-hydroxyl, or 2′-fluoro. For example, each nucleotide of the sense RNAi oligonucleotide and antisense RNAi oligonucleotide is independently modified with, 2′-O-methyl or 2′-fluoro. Each X, Y, Z, X′, Y′, and Z′, in particular, may represent a 2′-O-methyl modification or 2′-fluoro modification. In certain embodiments, the modification is a 2′-NMA modification.

[0761] In certain embodiments, the sense RNAi oligonucleotide of the RNAi compound may contain YYY motif occurring at 9, 10, and 11 positions of the RNAi oligonucleotide when the duplex region is 21 nucleotides, the count starting from the 1^{st} nucleotide from the 5′-end, or optionally, the count starting at the 1^{st} paired nucleotide within the duplex region, from the 5′-end; and Y represents 2′-F modification. The sense RNAi oligonucleotide may additionally contain XXX motif or ZZZ motifs as wing modifications at the opposite end of the duplex region; and XXX and ZZZ each independently represents a 2′-O-methyl modification or 2′-fluoro modification.

[0762] In certain embodiments, the antisense RNAi oligonucleotide may contain Y′Y′Y′ motif occurring at positions 11, 12, 13 of the RNAi oligonucleotide, the count starting from the 1^{st} nucleotide from the 5′-end, or optionally, the count starting at the 1^{st} paired nucleotide within the duplex region, from the 5′-end; and Y′ represents 2′-O-methyl modification. The antisense RNAi oligonucleotide may additionally contain X′X′X′ motif or Z′Z′Z′ motif as wing modifications at the opposite end of the duplex region; and X′X′X′ or Z′Z′Z′ each independently represents a 2′-O-methyl modification or 2′-fluoro modification.

[0763] The sense RNAi oligonucleotide represented by any one of the above formulas Ia, Ib, Ic, and Id forms a duplex with an antisense RNAi oligonucleotide being represented by any one of the formulas IIa, IIb, IIc, and IId, respectively.

[0764] Accordingly, the RNAi compounds described herein may comprise a sense RNAi oligonucleotide and an antisense RNAi oligonucleotide, each RNAi oligonucleotide having 14 to 30 nucleotides, the RNAi duplex represented by formula (III):

Sense: 5′nₚ-Nₐ—(XXX)ᵢ—N_{b}—YYY—N_{b}—(ZZZ)ⱼ—Nₐ-n_{q}3′

Antisense: 3′ nₚ′-Nₐ′—(X′X′X′)ₖ—N_{b}′—Y′Y′Y′—N_{b}′—(Z′Z′Z′)ₗ—Nₐ′-n_{q}′5′

[0765] wherein:

[0766] i, j, k, and 1 are each independently 0 or 1;

[0767] p, p′, q, and q′ are each independently 0-6;

[0768] each Nₐ and Nₐ′ independently represents 0-25 linked nucleosides, each sequence comprising at least two differently modified nucleotides;

[0769] each N_{b} and N_{b}′ independently represents 0-10 linked nucleosides;

[0770] wherein each nₚ′, nₚ, n_{q}′ and n_{q}, each of which may or may not be present, independently represents an overhang nucleotide; and

[0771] XXX, YYY, X′X′X′, Y′Y′Y′, and Z′Z′Z′ each independently represent one motif of three identical modifications on three consecutive nucleotides.

[0772] In certain embodiments, i is 0 and j is 0; or i is 1 and j is 0; or i is 0 and j is 1; or both i and j are 0; or both i and j are 1. In another embodiment, k is 0 and 1 is 0; or k is 1 and 1 is 0, or k is 0 and 1 is 1; or both k and 1 are 0; or both k and l are 1.

[0773] Exemplary combinations of the sense RNAi oligonucleotide and antisense RNAi oligonucleotide forming a RNAi duplex include the formulas below:

5′nₚ-Nₐ—Y Y Y—Nₐ-n_{q}3′

3′ nₚ′-Nₐ′—Y′Y′Y′—Nₐ′n_{q}′5′ (IIIa)

5′nₚ—Nₐ—Y Y Y—N_{b}—Z Z Z—Nₐ-n_{q}3′

3′ nₚ′-Nₐ′—Y′Y′Y′—Nb′—Z′Z′Z′—Nₐ′n_{q}′5′ (IIIb)

5′np-Nₐ—X X X—N_{b}—Y Y Y—Nₐ-n_{q}3′

3′np′-Nₐ′—X′X′X′—N_{b}′—Y′Y′Y′—Nₐ′-n_{q}5′ (IIIc)

5′np-Nₐ—X X X—N_{b}—Y Y Y—N_{b}—Z Z Z—Nₐ-n_{q}3′

3′ np′-Nₐ′—X′X′X′—N_{b}′—Y′Y′Y′—N_{b}′—Z′Z′Z′—Nₐ-n_{q}′5′ (IIId)

When the RNAi compound is represented with formula Ma, each Nₐ independently represents 2-20, 2-15, or 2-10 linked nucleosides.

[0774] When the RNAi compound is represented with formula IIIb, each N_{b} independently represents 1-10, 1-7, 1-5, or 1-4 linked nucleosides. Each Nₐ independently represents 2-20, 2-15, or 2-10 linked nucleosides.

[0775] When the RNAi compound is represented with formula IIIc, each N_{b}, N_{b}′ independently represents 0-10, 0-7, 0-10, 0-7, 0-5, 0-4, 0-2, or 0 linked nucleosides. Each Nₐ independently represents 2-20, 2-15, or 2-10 linked nucleosides.

[0776] When the RNAi compound is represented with formula IIId, each N_{b}, N_{b}′ independently represents 0-10, 0-7, 0-10, 0-7, 0-5, 0-4, 0-2, or 0 linked nucleosides. Each Nₐ, Nₐ′ independently 2-20, 2-15, or 2-10 linked nucleosides. Each Nₐ, Nₐ′, N_{b}, N_{b}′ independently comprises modifications of alternating pattern.

[0777] Each of X, Y, and Z in formulas III, IIIa, IIIb, IIIc, and IIId may be the same or different from each other.

[0778] When the RNAi compound is represented by formula III, IIIa, IIIb, IIIc, and/or IIId, at least one of the Y nucleotides may form a base pair with one of the Y′ nucleotides. Alternatively, at least two of the Y nucleotides may form base pairs with the corresponding Y′ nucleotides; or all three of the Y nucleotides may form base pairs with the corresponding Y′ nucleotides.

[0779] When the RNAi compound is represented by formula IIIb or IIId, at least one of the Z nucleotides may form a base pair with one of the Z′ nucleotides. Alternatively, at least two of the Z nucleotides may form base pairs with the corresponding Z′ nucleotides; or all three of the Z nucleotides may form base pairs with the corresponding Z′ nucleotides.

[0780] When the RNAi compound is represented by formula IIIc or IIId, at least one of the X nucleotides may form a base pair with one of the X′ nucleotides. Alternatively, at least two of the X nucleotides may form base pairs with the corresponding X′ nucleotides; or all three of the X nucleotides may form base pairs with the corresponding X′ nucleotides.

[0781] In certain embodiments, the modification of the Y nucleotide is different than the modification on the Y′ nucleotide, the modification on the Z nucleotide is different than the modification on the Z′ nucleotide, and/or the modification on the X nucleotide is different than the modification on the X′ nucleotide.

[0782] In certain embodiments, when the RNAi compound is represented by the formula IIId, the Nₐ modifications are 2′-O-methyl or 2′-fluoro modifications. In another embodiment, when the RNAi compound is represented by formula IIId, the Nₐ modifications are 2′-O-methyl or 2′-fluoro modifications and nₚ′>0 and at least one nₚ′ is linked to a neighboring nucleotide via phosphorothioate linkage. In other embodiments, when the RNAi compound is represented by formula IIId, the Nₐ modifications are 2′-O-methyl or 2′-fluoro modifications, nₚ′>0 and at least one nₚ′ is linked to a neighboring nucleotide via phosphorothioate linkage, and the sense RNAi oligonucleotide is conjugated to one or more cell targeting group attached through a bivalent or trivalent branched linker. In certain embodiments, when the RNAi compound is represented by formula IIId, the Nₐ modifications are 2′-O-methyl or 2′-fluoro modifications, nₚ′>0 and at least one nₚ′ is linked to a neighboring nucleotide via phosphorothioate linkage, the sense RNAi oligonucleotide comprises at least one phosphorothioate linkage and the sense RNAi oligonucleotide is conjugated to one or more cell targeting group attached through a bivalent or trivalent branched linker.

[0783] In certain embodiments, when the RNAi compound is represented by the formula Ma, the Nₐ modifications are 2′-O-methyl or 2′-fluoro modifications and nₚ′>0 and at least one nₚ′ is linked to a neighboring nucleotide via phosphorothioate linkage, the sense RNAi oligonucleotide comprises at least one phosphorothioate linkage and the sense RNAi oligonucleotide is conjugated to one or more cell targeting group attached through a bivalent or trivalent branched linker.

[0784] In certain embodiments, the modification is a 2′-NMA modification.

[0785] In certain embodiments, the antisense strand may comprise a stabilized phosphate group attached to the 5′ position of the 5′-most nucleoside. In certain embodiments, the stabilized phosphate group comprises an (E)-vinyl phosphonate. In certain embodiments, the stabilized phosphate group comprises a cyclopropyl phosphonate.

[0786] In certain embodiments, the antisense strand may comprise a seed-pairing destabilizing modification. In certain embodiments, the seed-pairing destabilizing modification is located at position 6 (counting from the 5′ end). In certain embodiments, the seed-pairing destabilizing modification is located at position 7 (counting from the 5′ end). In certain embodiments, the seed-pairing destabilizing modification is a GNA sugar surrogate. In certain embodiments, the seed-pairing destabilizing modification is an (S)-GNA. In certain embodiments, the seed-pairing destabilizing modification is a UNA. In certain embodiments, the seed-pairing destabilizing modification is a morpholino.

[0787] In certain embodiments, the sense strand may comprise an inverted abasic sugar moiety attached to the 5′-most nucleoside. In certain embodiments, the sense strand may comprise an inverted abasic sugar moiety attached to the 3′-most nucleoside. In certain embodiments, the sense strand may comprise inverted abasic sugar moieties attached to both the 5′-most and 3′-most nucleosides.

[0788] In certain embodiments, the sense strand may comprise a conjugate attached at position 6 (counting from the 5′ end). In certain embodiments, the conjugate is attached at the 2′ position of the nucleoside. In certain embodiments the conjugate is a C₁₆ lipid conjugate. In certain embodiments, the modified nucleoside at position 6 of the sense strand has a 2′-O-hexadecyl modified sugar moiety.

### IV. Antisense Activity

[0789] In certain embodiments, oligomeric compounds and oligomeric duplexes are capable of hybridizing to a target nucleic acid, resulting in at least one antisense activity; such oligomeric compounds and oligomeric duplexes are antisense compounds. In certain embodiments, antisense compounds have antisense activity when they reduce or inhibit the amount or activity of a target nucleic acid by 25% or more in the standard cell assay. In certain embodiments, antisense compounds selectively affect one or more target nucleic acid. Such antisense compounds comprise a nucleobase sequence that hybridizes to one or more target nucleic acid, resulting in one or more desired antisense activity and does not hybridize to one or more non-target nucleic acid or does not hybridize to one or more non-target nucleic acid in such a way that results in significant undesired antisense activity.

[0790] In certain antisense activities, hybridization of an antisense compound to a target nucleic acid results in recruitment of a protein that cleaves the target nucleic acid. For example, certain antisense compounds result in RNase H mediated cleavage of the target nucleic acid. RNase H is a cellular endonuclease that cleaves the RNA strand of an RNA:DNA duplex. The DNA in such an RNA:DNA duplex need not be unmodified DNA. In certain embodiments, described herein are antisense compounds that are sufficiently “DNA-like” to elicit RNase H activity. In certain embodiments, one or more non-DNA-like nucleoside in the gap of a gapmer is tolerated.

[0791] In certain antisense activities, an antisense compound or a portion of an antisense compound is loaded into an RNA-induced silencing complex (RISC), ultimately resulting in cleavage of the target nucleic acid. For example, certain antisense compounds result in cleavage of the target nucleic acid by Argonaute. Antisense compounds that are loaded into RISC are RNAi compounds. RNAi compounds may be double-stranded (siRNA or dsRNAi) or single-stranded (ssRNA).

[0792] In certain embodiments, hybridization of an antisense compound to a target nucleic acid does not result in recruitment of a protein that cleaves that target nucleic acid. In certain embodiments, hybridization of the antisense compound to the target nucleic acid results in alteration of splicing of the target nucleic acid. In certain embodiments, hybridization of an antisense compound to a target nucleic acid results in inhibition of a binding interaction between the target nucleic acid and a protein or other nucleic acid. In certain embodiments, hybridization of an antisense compound to a target nucleic acid results in alteration of translation of the target nucleic acid.

[0793] Antisense activities may be observed directly or indirectly. In certain embodiments, observation or detection of an antisense activity involves observation or detection of a change in an amount of a target nucleic acid or protein encoded by such target nucleic acid, a change in the ratio of splice variants of a nucleic acid or protein and/or a phenotypic change in a cell or animal.

[0794] V. Certain Target Nucleic Acids

[0795] In certain embodiments, oligomeric compounds comprise or consist of an oligonucleotide comprising a region that is complementary to a target nucleic acid. In certain embodiments, the target nucleic acid is an endogenous RNA molecule. In certain embodiments, the target nucleic acid encodes a protein. In certain such embodiments, the target nucleic acid is selected from: a mature mRNA and a pre-mRNA, including intronic, exonic and untranslated regions. In certain embodiments, the target RNA is a mature mRNA. In certain embodiments, the target nucleic acid is a pre-mRNA. In certain embodiments, the target region is entirely within an intron. In certain embodiments, the target region spans an intron/exon junction. In certain embodiments, the target region is at least 50% within an intron. In certain embodiments, the target nucleic acid is the RNA transcriptional product of a retrogene. In certain embodiments, the target nucleic acid is a non-coding RNA. In certain embodiments, the target non-coding RNA is selected from: a long non-coding RNA, a short non-coding RNA, an intronic RNA molecule.

[0796] A. Complementarity/Mismatches to the Target Nucleic Acid and Duplex Complementarity

[0797] In certain embodiments, oligonucleotides are complementary to the target nucleic acid over the entire length of the oligonucleotide. In certain embodiments, oligonucleotides are 99%, 95%, 90%, 85%, or 80% complementary to the target nucleic acid. In certain embodiments, oligonucleotides are at least 80% complementary to the target nucleic acid over the entire length of the oligonucleotide and comprise a region that is 100% or fully complementary to a target nucleic acid. In certain embodiments, the region of full complementarity is from 6 to 20, 10 to 18, or 18 to 20 nucleobases in length.

### Gapmer Oligonucleotides

[0798] It is possible to introduce mismatch bases without eliminating activity. For example, Gautschi et al (J. Natl. Cancer Inst. 93:463-471, March 2001) demonstrated the ability of an oligonucleotide having 100% complementarity to the bcl-2 mRNA and having 3 mismatches to the bcl-xL mRNA to reduce the expression of both bcl-2 and bcl-xL in vitro and in vivo. Furthermore, this oligonucleotide demonstrated potent anti-tumor activity in vivo. Maher and Dolnick (Nuc. Acid. Res. 16:3341-3358, 1988) tested a series of tandem 14 nucleobase oligonucleotides, and 28 and 42 nucleobase oligonucleotides comprised of the sequence of two or three of the tandem oligonucleotides, respectively, for their ability to arrest translation of human DHFR in a rabbit reticulocyte assay. Each of the three 14 nucleobase oligonucleotides alone was able to inhibit translation, albeit at a more modest level than the 28 or 42 nucleobase oligonucleotides.

[0799] In certain embodiments, oligonucleotides comprise one or more mismatched nucleobases relative to the target nucleic acid. In certain embodiments, antisense activity against the target is reduced by such mismatch, but activity against a non-target is reduced by a greater amount. Thus, in certain embodiments selectivity of the oligonucleotide is improved. In certain embodiments, the mismatch is specifically positioned within an oligonucleotide having a gapmer motif. In certain embodiments, the mismatch is at position 1, 2, 3, 4, 5, 6, 7, or 8 from the 5′-end of the gap region. In certain embodiments, the mismatch is at position 9, 8, 7, 6, 5, 4, 3, 2, 1 from the 3′-end of the gap region. In certain embodiments, the mismatch is at position 1, 2, 3, or 4 from the 5′-end of the wing region. In certain embodiments, the mismatch is at position 4, 3, 2, or 1 from the 3′-end of the wing region.

### Antisense RNAi Oligonucleotides

[0800] In certain embodiments, antisense RNAi oligonucleotides comprise one or more mismatched nucleobases relative to the target nucleic acid. In certain embodiments, RNAi activity against the target is reduced by such mismatch, but activity against a non-target is reduced by a greater amount. Thus, in certain embodiments selectivity of the antisense RNAi oligonucleotides is improved.

[0801] In certain embodiments, antisense RNAi oligonucleotides comprise a targeting region complementary to the target nucleic acid. In certain embodiments, the targeting region comprises or consists of at least 8, at least 9, at least 10, at least 11, at least 12, at least 13, at least 14, at least 15, at least 16, at least 17, at least 18, at least 19, at least 20, at least 21, at least 22, at least 23, at least 25 or at least 25 contiguous nucleotides. In certain embodiments, the targeting region constitutes 70%, 80%, 85%, 90%, 95% of the nucleosides of the antisense RNAi oligonucleotide. In certain embodiments, the targeting region constitutes all of the nucleosides of the antisense RNAi oligonucleotide. In certain embodiments, the targeting region of the antisense RNAi oligonucleotide is at least 99%, 95%, 90%, 85%, or 80% complementary to the target nucleic acid. In certain embodiments, the targeting region of the antisense RNAi oligonucleotide is 100% complementary to the target nucleic acid.

### Sense RNAi Oligonucleotides

[0802] In certain embodiments, RNAi compounds comprise a sense RNAi oligonucleotide. In such embodiments, sense RNAi oligonucleotides comprise an antisense hybridizing region complementary to the antisense RNAi oligonucleotide. In certain embodiments, the antisense hybridizing region comprises or consists of at least 8, at least 9, at least 10, at least 11, at least 12, at least 13, at least 14, at least 15, at least 16, at least 17, at least 18, at least 19, at least 20, at least 21, at least 22, at least 23, at least 25 or at least 25 contiguous nucleotides. In certain embodiments, the antisense hybridizing region constitutes 70%, 80%, 85%, 90%, 95% of the nucleosides of the sense RNAi oligonucleotide. In certain embodiments, the antisense hybridizing region constitutes all of the nucleosides of the sense RNAi oligonucleotide. In certain embodiments, the antisense hybridizing region of the sense RNAi oligonucleotide is at least 99%, 95%, 90%, 85%, or 80% complementary to the antisense RNAi oligonucleotide. In certain embodiments, the antisense hybridizing region of the sense RNAi oligonucleotide is 100% complementary to the antisense RNAi oligonucleotide.

[0803] The hybridizing region of a sense RNAi oligonucleotide hybridizes with the antisense RNAi oligonucleotide to form a duplex region. In certain embodiments, such duplex region consists of 7 hybridized pairs of nucleosides (one of each pair being on the antisense RNAi oligonucleotide and the other of each pair bien on the sense RNAi oligonucleotide). In certain embodiments, a duplex region comprises least 8, at least 9, at least 10, at least 11, at least 12, at least 13, at least 14, at least 15, at least 16, at least 17, at least 18, at least 19, at least 20, at least 21, at least 22, at least 23, at least 25 or at least 25 hybridized pairs. In certain embodiments, each nucleoside of antisense RNAi oligonucleotide is paired in the duplex region (i.e., the antisense RNAi oligonucleotide has no overhanging nucleosides). In certain embodiments, the antisense RNAi oligonucleotide includes unpaired nucleosides at the 3′-end and/or the 5′end (overhanging nucleosides). In certain embodiments, each nucleoside of sense RNAi oligonucleotide is paired in the duplex region (i.e., the sense RNAi oligonucleotide has no overhanging nucleosides). In certain embodiments, the sense RNAi oligonucleotide includes unpaired nucleosides at the 3′-end and/or the 5′end (overhanging nucleosides). In certain embodiments, duplexes formed by the antisense RNAi oligonucleotide and the sense RNAi oligonucleotide do not include any overhangs at one or both ends. Such ends without overhangs are referred to as blunt. In certain embodiments wherein the antisense RNAi oligonucleotide has overhanging nucleosides, one or more of those overhanging nucleosides are complementary to the target nucleic acid. In certain embodiments wherein the antisense RNAi oligonucleotide has overhanging nucleosides, one or more of those overhanging nucleosides are not complementary to the target nucleic acid.

[0804] B. APP

[0805] In certain embodiments, oligomeric compounds comprise or consist of an oligonucleotide comprising a region that is complementary to a target nucleic acid, wherein the target nucleic acid is APP. In certain embodiments, APP nucleic acid has the sequence set forth SEQ ID NO: 1 (the cDNA of Ensembl transcript ENST00000346798.7) or the complement of SEQ ID NO: 2 (GENBANK Accession No. NC_000021.9 truncated from nucleotides 25878001 to 26174000). In certain embodiments, APP nucleic acid has the sequence set forth in any of known splice variants of APP, including but not limited to SEQ ID NO: 3 (the cDNA of Ensembl transcript ENST00000357903.7), SEQ ID NO: 4 (the cDNA of Ensembl transcript ENST00000348990.9), SEQ ID NO: 5 (the cDNA of Ensembl transcript ENST00000440126.7), SEQ ID NO: 6 (the cDNA of Ensembl transcript ENST00000354192.7), and/or SEQ ID NO: 7 (the cDNA of Ensembl transcript ENST00000358918.7). In certain embodiments, contacting a cell with an oligomeric compound complementary to SEQ ID NO: 1, SEQ ID NO: 2, SEQ ID NO: 3, SEQ ID NO: 4, SEQ ID NO: 5, SEQ ID NO: 6, or SEQ ID NO: 7 reduces the amount of APP RNA, and in certain embodiments reduces the amount of APP protein. In certain embodiments, the oligomeric compound consists of a modified oligonucleotide. In certain embodiments, contacting a cell with an oligomeric compound complementary to SEQ ID NO: 1, SEQ ID NO: 2, SEQ ID NO: 3, SEQ ID NO: 4, SEQ ID NO: 5, SEQ ID NO: 6, or SEQ ID NO: 7 results in reduced aggregation of β-amyloid. In certain embodiments, the oligomeric compound consists of a modified oligonucleotide. In certain embodiments, the oligomeric compound consists of a modified oligonucleotide and a conjugate group.

[0806] C. Certain Target Nucleic Acids in Certain Tissues

[0807] In certain embodiments, oligomeric compounds comprise or consist of an oligonucleotide comprising a region that is complementary to a target nucleic acid, wherein the target nucleic acid is expressed in a pharmacologically relevant tissue. In certain embodiments, the pharmacologically relevant tissues are the cells and tissues that comprise the central nervous system. Such tissues include the cortex, spinal cord, and the hippocampus.

### VI. Certain Pharmaceutical Compositions

[0808] In certain embodiments, described herein are pharmaceutical compositions comprising one or more oligomeric compounds. In certain embodiments, the one or more oligomeric compounds each consists of a modified oligonucleotide. In certain embodiments, the pharmaceutical composition comprises a pharmaceutically acceptable diluent or carrier. In certain embodiments, a pharmaceutical composition comprises or consists of a sterile saline solution and one or more oligomeric compound. In certain embodiments, the sterile saline is pharmaceutical grade saline. In certain embodiments, a pharmaceutical composition comprises or consists of one or more oligomeric compound and sterile water. In certain embodiments, the sterile water is pharmaceutical grade water. In certain embodiments, a pharmaceutical composition comprises or consists of one or more oligomeric compound and phosphate-buffered saline (PBS). In certain embodiments, the sterile PBS is pharmaceutical grade PBS. In certain embodiments, a pharmaceutical composition comprises or consists of one or more oligomeric compound and artificial cerebrospinal fluid. In certain embodiments, the artificial cerebrospinal fluid is pharmaceutical grade.

[0809] In certain embodiments, a pharmaceutical composition comprises a modified oligonucleotide and artificial cerebrospinal fluid. In certain embodiments, a pharmaceutical composition consists of a modified oligonucleotide and artificial cerebrospinal fluid. In certain embodiments, a pharmaceutical composition consists essentially of a modified oligonucleotide and artificial cerebrospinal fluid. In certain embodiments, the artificial cerebrospinal fluid is pharmaceutical grade.

[0810] In certain embodiments, pharmaceutical compositions comprise one or more oligomeric compound and one or more excipients. In certain embodiments, excipients are selected from water, salt solutions, alcohol, polyethylene glycols, gelatin, lactose, amylase, magnesium stearate, talc, silicic acid, viscous paraffin, hydroxymethylcellulose and polyvinylpyrrolidone.

[0811] In certain embodiments, oligomeric compounds may be admixed with pharmaceutically acceptable active and/or inert substances for the preparation of pharmaceutical compositions or formulations. Compositions and methods for the formulation of pharmaceutical compositions depend on a number of criteria, including, but not limited to, route of administration, extent of disease, or dose to be administered.

[0812] In certain embodiments, pharmaceutical compositions comprising an oligomeric compound encompass any pharmaceutically acceptable salts of the oligomeric compound, esters of the oligomeric compound, or salts of such esters. In certain embodiments, pharmaceutical compositions comprising oligomeric compounds comprising one or more oligonucleotide, upon administration to an animal, including a human, are capable of providing (directly or indirectly) the biologically active metabolite or residue thereof. Accordingly, for example, the disclosure is also drawn to pharmaceutically acceptable salts of oligomeric compounds, prodrugs, pharmaceutically acceptable salts of such prodrugs, and other bioequivalents. Suitable pharmaceutically acceptable salts include, but are not limited to, sodium and potassium salts. In certain embodiments, prodrugs comprise one or more conjugate group attached to an oligonucleotide, wherein the conjugate group is cleaved by endogenous nucleases within the body.

[0813] Lipid moieties have been used in nucleic acid therapies in a variety of methods. In certain such methods, the nucleic acid, such as an oligomeric compound, is introduced into preformed liposomes or lipoplexes made of mixtures of cationic lipids and neutral lipids. In certain methods, DNA complexes with mono- or poly-cationic lipids are formed without the presence of a neutral lipid. In certain embodiments, a lipid moiety is selected to increase distribution of a pharmaceutical agent to a particular cell or tissue. In certain embodiments, a lipid moiety is selected to increase distribution of a pharmaceutical agent to fat tissue. In certain embodiments, a lipid moiety is selected to increase distribution of a pharmaceutical agent to muscle tissue.

[0814] In certain embodiments, pharmaceutical compositions comprise a delivery system. Examples of delivery systems include, but are not limited to, liposomes and emulsions. Certain delivery systems are useful for preparing certain pharmaceutical compositions including those comprising hydrophobic compounds. In certain embodiments, certain organic solvents such as dimethylsulfoxide are used.

[0815] In certain embodiments, pharmaceutical compositions comprise one or more tissue-specific delivery molecules designed to deliver the one or more pharmaceutical agents of the present invention to specific tissues or cell types. For example, in certain embodiments, pharmaceutical compositions include liposomes coated with a tissue-specific antibody.

[0816] In certain embodiments, pharmaceutical compositions comprise a co-solvent system. Certain of such co-solvent systems comprise, for example, benzyl alcohol, a nonpolar surfactant, a water-miscible organic polymer, and an aqueous phase. In certain embodiments, such co-solvent systems are used for hydrophobic compounds. A non-limiting example of such a co-solvent system is the VPD co-solvent system, which is a solution of absolute ethanol comprising 3% w/v benzyl alcohol, 8% w/v of the nonpolar surfactant Polysorbate 80™ and 65% w/v polyethylene glycol 300. The proportions of such co-solvent systems may be varied considerably without significantly altering their solubility and toxicity characteristics. Furthermore, the identity of co-solvent components may be varied: for example, other surfactants may be used instead of Polysorbate 80™; the fraction size of polyethylene glycol may be varied; other biocompatible polymers may replace polyethylene glycol, e.g., polyvinyl pyrrolidone; and other sugars or polysaccharides may substitute for dextrose.

[0817] In certain embodiments, pharmaceutical compositions are prepared for oral administration. In certain embodiments, pharmaceutical compositions are prepared for buccal administration. In certain embodiments, a pharmaceutical composition is prepared for administration by injection (e.g., intravenous, subcutaneous, intramuscular, intrathecal (IT), intracerebroventricular (ICV), etc.). In certain of such embodiments, a pharmaceutical composition comprises a carrier and is formulated in aqueous solution, such as water or physiologically compatible buffers such as Hanks's solution, Ringer's solution, or physiological saline buffer. In certain embodiments, other ingredients are included (e.g., ingredients that aid in solubility or serve as preservatives). In certain embodiments, injectable suspensions are prepared using appropriate liquid carriers, suspending agents and the like. Certain pharmaceutical compositions for injection are presented in unit dosage form, e.g., in ampoules or in multi-dose containers. Certain pharmaceutical compositions for injection are suspensions, solutions or emulsions in oily or aqueous vehicles, and may contain formulatory agents such as suspending, stabilizing and/or dispersing agents. Certain solvents suitable for use in pharmaceutical compositions for injection include, but are not limited to, lipophilic solvents and fatty oils, such as sesame oil, synthetic fatty acid esters, such as ethyl oleate or triglycerides, and liposomes.

[0818] Under certain conditions, certain compounds disclosed herein act as acids. Although such compounds may be drawn or described in protonated (free acid) form, or ionized and in association with a cation (salt) form, aqueous solutions of such compounds exist in equilibrium among such forms. For example, a phosphate linkage of an oligonucleotide in aqueous solution exists in equilibrium among free acid, anion and salt forms. Unless otherwise indicated, compounds described herein are intended to include all such forms. Moreover, certain oligonucleotides have several such linkages, each of which is in equilibrium. Thus, oligonucleotides in solution exist in an ensemble of forms at multiple positions all at equilibrium. The term “oligonucleotide” is intended to include all such forms. Drawn structures necessarily depict a single form. Nevertheless, unless otherwise indicated, such drawings are likewise intended to include corresponding forms. Herein, a structure depicting the free acid of a compound followed by the term “or a salt thereof” expressly includes all such forms that may be fully or partially protonated/de-protonated/in association with a cation. In certain instances, one or more specific cation is identified.

[0819] In certain embodiments, modified oligonucleotides or oligomeric compounds are in aqueous solution with sodium. In certain embodiments, modified oligonucleotides or oligomeric compounds are in aqueous solution with potassium. In certain embodiments, modified oligonucleotides or oligomeric compounds are in PBS. In certain embodiments, modified oligonucleotides or oligomeric compounds are in water. In certain such embodiments, the pH of the solution is adjusted with NaOH and/or HCl to achieve a desired pH.

[0820] Herein, certain specific doses are described. A dose may be in the form of a dosage unit. For clarity, a dose (or dosage unit) of a modified oligonucleotide or an oligomeric compound in milligrams indicates the mass of the free acid form of the modified oligonucleotide or oligomeric compound. As described above, in aqueous solution, the free acid is in equilibrium with anionic and salt forms. However, for the purpose of calculating dose, it is assumed that the modified oligonucleotide or oligomeric compound exists as a solvent-free, sodium-acetate free, anhydrous, free acid. For example, where a modified oligonucleotide or an oligomeric compound is in solution comprising sodium (e.g., saline), the modified oligonucleotide or oligomeric compound may be partially or fully de-protonated and in association with Na+ ions. However, the mass of the protons are nevertheless counted toward the weight of the dose, and the mass of the Na+ ions are not counted toward the weight of the dose. Thus, for example, a dose, or dosage unit, of 10 mg of a number of fully protonated molecules that weighs 10 mg. This would be equivalent to 10.58 mg of solvent-free, sodium acetate-free, anhydrous sodiated Compound No. 699467 or 10.65 mg of solvent-free, sodium acetate-free, anhydrous sodiated Compound No. 1381709. When an oligomeric compound comprises a conjugate group, the mass of the conjugate group is included in calculating the dose of such oligomeric compound. If the conjugate group also has an acid, the conjugate group is likewise assumed to be fully protonated for the purpose of calculating dose.

### VII. Certain Hotspot Regions

### 1. Nucleobases 3192-9277 of SEQ ID NO: 3

[0821] In certain embodiments, nucleobases 3192-3277 of SEQ ID NO: 3 comprise a hotspot region. In certain embodiments, oligomeric compounds or oligomeric duplexes comprise modified oligonucleotides that are complementary within nucleobases 3192-3277 of SEQ ID NO: 3. In certain embodiments, modified oligonucleotides are 23 nucleobases in length. In certain embodiments, modified oligonucleotides are antisense RNAi oligonucleotides. In certain embodiments, the antisense RNAi oligonucleotide has a sugar motif (from 5′ to 3′) of: mfmfmfmfmfmfmfmfmfmfmmm; wherein “m” represents a 2′-O methylribosyl sugar, and the “f” represents a 2′-fluororibosyl sugar; and a linkage motif (from 5′ to 3′) of: ssooooooooooooooooooss; wherein ‘o’ represents a phosphodiester internucleoside linkage and ‘s’ represents a phosphorothioate internucleoside linkage.

[0822] The nucleobase sequences of SEQ ID Nos: 821-824 are complementary within nucleobases 3192-3277 of SEQ ID NO: 3.

[0823] RNAi compounds 1382120, 1382123, 1382124, and 1382128 comprise an antisense RNAi oligonucleotide that is complementary within nucleobases 3192-3277 of SEQ ID NO: 3.

[0824] In certain embodiments, modified oligonucleotides complementary within nucleobases 5635-5677 of SEQ ID NO: 3 achieve at least 92% reduction of APP RNA in vitro in the standard cell assay. In certain embodiments, modified oligonucleotides complementary within nucleobases 5635-5677 of SEQ ID NO: 3 achieve an average of 94% reduction of APP RNA in vitro in the standard cell assay.

### 2. Additional Hotspot Regions

[0825] In certain embodiments, the ranges described in the Table below comprise hotspot regions. Each hotspot region begins with the nucleobase of SEQ ID NO: 1 identified in the “Start Site SEQ ID NO: 1” column and ends with the nucleobase of SEQ ID NO: 1 identified in the “Stop Site SEQ ID NO: 1” column. In certain embodiments, oligomeric compounds or oligomeric duplexes comprise modified oligonucleotides that are complementary within any of the hotspot regions 1-47, as defined in the table below. In certain embodiments, modified oligonucleotides are 18 nucleobases in length. In certain embodiments, modified oligonucleotides are 20 nucleobases in length. In certain embodiments, modified oligonucleotides are 23 nucleobases in length. In certain embodiments, both RNAseH-based antisense oligonucleotides and RISC-based RNAi oligomeric duplexes are active within a given hotspot region, as indicated in the table below.

[0826] In certain embodiments, oligomeric compounds comprise modified oligonucleotides that are gapmers. In certain embodiments, modified oligonucleotides have the sugar motif eeeeeddddddddkkeee, wherein each “e” is nucleoside comprising a 2′-MOE sugar moiety, each “k” is a nucleoside comprising a cEt sugar moiety, and each “d” is a nucleoside comprising a 2′-β-D-deoxyribosyl sugar moiety. In certain embodiments, modified oligonucleotides have the sugar motif eeeeeddddddddkeeee, wherein each “e” is nucleoside comprising a 2′-MOE sugar moiety, each “k” is a nucleoside comprising a cEt sugar moiety, and each “d” is a nucleoside comprising a 2′-β-D-deoxyribosyl sugar moiety. In certain embodiments, modified oligonucleotides are 5-10-5 MOE gapmers.

[0827] In certain embodiments, oligomeric duplexes comprise an antisense RNAi oligonucleotide and a sense RNAi oligonucleotide, wherein, the antisense RNAi oligonucleotide is complementary within a given hotspot region. In certain embodiments, the antisense RNAi oligonucleotide is 23 nucleosides in length; has a sugar motif (from 5′ to 3′) of: mfmfmfmfmfmfmfmfmfmfmmm; wherein “m” represents a 2′-O methylribosyl sugar, and the “f” represents a 2′-fluororibosyl sugar; and a linkage motif (from 5′ to 3′) of: ssooooooooooooooooooss; wherein ‘o’ represents a phosphodiester internucleoside linkage and ‘s’ represents a phosphorothioate internucleoside linkage. The sense RNAi oligonucleotides in each case is 21 nucleosides in length; has a sugar motif (from 5′ to 3′) of: fmfmfmfmfmfmfmfmfmfmf; wherein “m” represents a 2′-O methylribosyl sugar, and the “f” represents a 2′-fluororibosyl sugar; and a linkage motif (from 5′ to 3′) of: ssooooooooooooooooss; wherein ‘o’ represents a phosphodiester internucleoside linkage and ‘s’ represents a phosphorothioate internucleoside linkage.

[0828] The nucleobase sequence of the gapmer antisense oligonucleotide listed under “Gapmer Antisense Oligonucleotides”/“Compound ID in range” column in the table below is complementary to SEQ ID NO: 1 within the specified hotspot region. The nucleobase sequence of the gapmer antisense oligonucleotides listed in the “Gapmer Antisense Oligonucleotides”/“SEQ ID NO: in range” column in the table below are complementary to the target sequence, SEQ ID NO: 1, within the specified hotspot region.

[0829] The nucleobase sequence of the antisense RNAi oligonculeotide corresponding to the RNAi Compound ID listed under “RNAi Compounds”/“RNAi Compound ID in range” column in the table below is complementary to SEQ ID NO: 1 within the specified hotspot region. The nucleobase sequence of the antisense RNAi oligonucleotide list in the “RNAi Compounds”/“SEQ ID NO: in range” column is complementary to the target sequence, NO: 1, within the specified hotspot region.

[0830] In certain embodiments, gapmers complementary to nucleobases within the hotspot region achieve at least “Gapmer Antisense Oligonucleotides”/“Min. % Red.” (minimum % reduction, relative to untreated control cells) of APP RNA in vitro in the standard cell assay, as indicated in the table below. In certain embodiments, modified oligonucleotides complementary to nucleobases within the hotspot region achieve an average of “Gapmer Antisense Oligonucleotides”/“Avg. % Red.” (average % reduction, relative to untreated control cells) of APP RNA in vitro in the standard cell assay, as indicated in the table below. In certain embodiments, modified oligonucleotides complementary to nucleobases within the hotspot region achieve a maximum of “Gapmer Antisense Oligonucleotides”/“Max. % Red.” (maximum % reduction, relative to untreated control cells) of APP RNA in vitro in the standard cell assay, as indicated in the table below.

[0831] In certain embodiments, RNAi oligomeric duplexes having an antisense RNAi oligonucleotide complementary to nucleobases within the hotspot region achieve at least “RNAi Compounds”/“Min. % Red. RNAi” (minimum % reduction, relative to untreated control cells) of APP RNA in vitro in the standard cell assay, as indicated in the table below. In certain embodiments, RNAi oligomeric duplexes having an antisense RNAi oligonucleotide complementary to nucleobases within the hotspot region achieve an average of “RNAi Compounds”/“Avg. % Red.” (average % reduction, relative to untreated control cells) of APP RNA in vitro in the standard cell assay, as indicated in the table below. In certain embodiments, RNAi oligomeric duplexes having an antisense RNAi oligonucleotide complementary to nucleobases within the hotspot region achieve a maximum of “RNAi Compounds”/“Max. % Red. RNAi” (maximum % reduction, relative to untreated control cells) of APP RNA in vitro in the standard cell assay, as indicated in the table below.

TABLE 1a
APP Hotspot Activity

| | | | Gapmer Antisense | | | | | |
|---|---|---|---|---|---|---|---|---|
| Hotspot | Start Site | Stop Site | Oligonucleotides | | | RNAi Compounds | | |
| Region | SEQ ID | SEQ ID | Min. % | Max. % | Avg. % | Min. % | Max. % | Avg. % |
| ID | NO: 1 | NO: 1 | Red. | Red. | Red. | Red. | Red. | Red. |
| 1 | 40 | 78 | 54 | 74 | 60 | 8 | 8 | 8 |
| 2 | 69 | 146 | 41 | 69 | 53 | 8 | 83 | 53 |
| 3 | 83 | 246 | 40 | 77 | 56 | 62 | 93 | 78 |
| 4 | 94 | 225 | 45 | 77 | 58 | 62 | 93 | 81 |
| 5 | 83 | 129 | 41 | 69 | 53 | 67 | 67 | 67 |
| 6 | 194 | 231 | 45 | 75 | 58 | 80 | 80 | 80 |
| 7 | 194 | 238 | 40 | 75 | 57 | 80 | 80 | 80 |
| 8 | 236 | 268 | 46 | 76 | 62 | 92 | 92 | 92 |
| 9 | 258 | 288 | 48 | 81 | 66 | 82 | 82 | 82 |
| 10 | 285 | 311 | 46 | 59 | 51 | 89 | 89 | 89 |
| 11 | 296 | 321 | 46 | 76 | 61 | n/a | n/a | n/a |
| 12 | 307 | 330 | 41 | 60 | 50 | 76 | 76 | 76 |
| 13 | 330 | 352 | 34 | 64 | 55 | n/a | n/a | n/a |
| 14 | 329 | 352 | 33 | 64 | 51 | 65 | 65 | 65 |
| 15 | 339 | 383 | 38 | 81 | 56 | 50 | 50 | 50 |
| 16 | 413 | 477 | 23 | 74 | 55 | 30 | 90 | 68 |
| 17 | 415 | 477 | 23 | 74 | 55 | n/a | n/a | n/a |
| 18 | 415 | 439 | 57 | 65 | 62 | n/a | n/a | n/a |
| 19 | 477 | 506 | 1 | 71 | 52 | n/a | n/a | n/a |
| 20 | 477 | 523 | 1 | 81 | 59 | 92 | 92 | 92 |
| 21 | 477 | 541 | 1 | 81 | 59 | 92 | 97 | 95 |
| 22 | 530 | 557 | 56 | 70 | 65 | n/a | n/a | n/a |
| 23 | 581 | 638 | 71 | 76 | 73 | 80 | 91 | 85 |
| 24 | 636 | 661 | 55 | 84 | 68 | 24 | 24 | 24 |
| 25 | 652 | 697 | 1 | 85 | 62 | 79 | 79 | 79 |
| 26 | 728 | 821 | 58 | 76 | 67 | 65 | 86 | 78 |
| 27 | 770 | 821 | 58 | 58 | 58 | 65 | 85 | 75 |
| 28 | 920 | 950 | 41 | 67 | 53 | 19 | 19 | 19 |
| 29 | 1006 | 1049 | 13 | 62 | 43 | 72 | 72 | 72 |
| 30 | 1152 | 1179 | 40 | 78 | 57 | n/a | n/a | n/a |
| 31 | 1227 | 1274 | 33 | 74 | 50 | 33 | 33 | 33 |
| 32 | 1227 | 1265 | 33 | 74 | 49 | n/a | n/a | n/a |
| 33 | 1268 | 1332 | 0 | 0 | 0 | 85 | 92 | 89 |
| 34 | 1268 | 1311 | n/a | n/a | n/a | 85 | 92 | 88 |
| 35 | 1289 | 1332 | 0 | 0 | 0 | 91 | 92 | 91 |
| 36 | 1518 | 1543 | 39 | 65 | 50 | 28 | 28 | 28 |
| 37 | 1531 | 1593 | 33 | 80 | 55 | 44 | 71 | 57 |
| 38 | 1544 | 1593 | 33 | 80 | 56 | 71 | 71 | 71 |
| 39 | 1634 | 1657 | 0 | 82 | 43 | n/a | n/a | n/a |
| 40 | 1778 | 1800 | 39 | 58 | 51 | n/a | n/a | n/a |
| 41 | 1882 | 1908 | 43 | 90 | 70 | n/a | n/a | n/a |
| 42 | 2051 | 2074 | 51 | 58 | 53 | n/a | n/a | n/a |
| 43 | 2360 | 3117 | n/a | n/a | n/a | 59 | 96 | 88 |
| 44 | 2402 | 3117 | n/a | n/a | n/a | 59 | 96 | 88 |
| 45 | 2360 | 2655 | n/a | n/a | n/a | 83 | 94 | 90 |
| 46 | 2402 | 2655 | n/a | n/a | n/a | 83 | 94 | 90 |
| 47 | 2675 | 3054 | n/a | n/a | n/a | 84 | 96 | 91 |

TABLE 1b
APP Hotspot Compounds and Sequences

| | | | Gapmer Antisense | | | |
|---|---|---|---|---|---|---|
| | | | Oligonucleotides | | RNAi Compounds | |
| | | | | | | SEQ ID NO: |
| Hotspot | Start Site | Stop Site | | | | in range |
| Region | SEQ ID | SEQ ID | Compound ID | SEQ ID NO: | RNAi Compound ID | (Antisense |
| ID | NO: 1 | NO: 1 | in range | in range | in range | Sequence) |
| 1 | 40 | 78 | 828404-828407 | 22, 241, 315, | 1381712 | 668 |
| | | | | 391 | | |
| 2 | 69 | 146 | 828412-828421 | 23, 24, 95, 96, | 1381733, 1381734, | 674, 675, 678 |
| | | | | 170, 171, 243, | 1381740 | |
| | | | | 317, 392, 393 | | |
| 3 | 83 | 246 | 828413-828429 | 12, 23, 24, 95, | 1381733, 1381735, | 674, 676, 677, |
| | | | | 96, 97, 170, | 1381736, 1381740, | 678, 682, 686, |
| | | | | 171, 172, 243, | 1381755, 1381771, | 688 |
| | | | | 244, 245, 317, | 1381773 | |
| | | | | 318, 319, 393, | | |
| | | | | 394, 395 | | |
| 4 | 94 | 225 | 828417-828424 | 24, 96, 171, | 1381733, 1381735, | 674, 676, 677, |
| | | | | 244, 317, 318, | 1381736, 1381740, | 678, 682, 686 |
| | | | | 393, 394 | 1381755, 1381771 | |
| 5 | 83 | 129 | 828413-828420 | 23, 24, 95, 96, | 1381733 | 674 |
| | | | | 170, 243, 317, | | |
| | | | | 393 | | |
| 6 | 194 | 231 | 699467, | 12, 97, 172, | 1381771 | 686 |
| | | | 828423-828426 | 318, 394 | | |
| 7 | 194 | 238 | 699467, | 12, 97, 172, | 1381771 | 686 |
| | | | 828423-828429 | 245, 318, 319, | | |
| | | | | 394, 395 | | |
| 8 | 236 | 268 | 828434-828438 | 26, 99, 174, | 1381772 | 687 |
| | | | | 320, 396 | | |
| 9 | 258 | 288 | 828440-828445 | 27, 100, 175, | 1381776 | 689 |
| | | | | 248, 321, 397 | | |
| 10 | 285 | 311 | 828447-828452 | 28, 101, 176, | 1381778 | 690 |
| | | | | 249, 323, 398 | | |
| 11 | 296 | 321 | 828454-828457 | 29, 102, 177, | n/a | n/a |
| | | | | 250 | | |
| 12 | 307 | 330 | 699500, 699501, | 13, 88, 163, | 1381789 | 692 |
| | | | 699503, 699505 | 386 | | |
| 13 | 330 | 352 | 699519, | 15, 103, 178, | n/a | n/a |
| | | | 828458-828461 | 251, 400 | | |
| 14 | 329 | 352 | 699518, 699519, | 15, 103, 178, | 1381790 | 693 |
| | | | 828458-828461 | 251, 313 400 | | |
| 15 | 339 | 383 | 828463-828467 | 30, 104, 179, | 1381798 | 697 |
| | | | | 252, 401 | | |
| 16 | 413 | 477 | 828480-828491 | 33, 34, 107, | 1381817, 1381818, | 702, 703, 704 |
| | | | | 108, 182, 183, | 1381825 | |
| | | | | 255, 256, 327, | | |
| | | | | 328, 404, 405 | | |
| 17 | 415 | 477 | 828480-828491 | 33, 34, 107, | 1381817, 1381825 | 702, 704 |
| | | | | 108, 182, 183, | | |
| | | | | 255, 256, 327, | | |
| | | | | 328, 404, 405 | | |
| 18 | 415 | 439 | 828480-828482 | 33, 327, 404 | n/a | n/a |
| 19 | 477 | 506 | 699533, 699535, | 16, 257, 330, | n/a | n/a |
| | | | 828497-828498, | 388, 475 ,502 | | |
| | | | 912249-912251, | | | |
| | | | 912292 | | | |
| 20 | 477 | 523 | 699533, 699535, | 16, 90, 165, | 1381832 | 708 |
| | | | 699537,699539, | 257, 258, 330, | | |
| | | | 828497-828499, | 388, 475-477, | | |
| | | | 912249-912255, | 502-504 | | |
| | | | 912292-912294 | | | |
| 21 | 477 | 541 | 699533, 699535, | 16, 36, 90, | 1381832, 1381904 | 708, 731 |
| | | | 699537, 699539, | 110, 165, 257, | | |
| | | | 828497-828503, | 258, 330, 331, | | |
| | | | 912249-912255, | 388, 407, 475- | | |
| | | | 912292-912294 | 477, 502-504 | | |
| 22 | 530 | 557 | 828507-828509 | 37, 111, 408 | n/a | n/a |
| 23 | 581 | 638 | 828526, 828527 | 40, 114 | 1381918, 1381923 | 736, 738 |
| 24 | 636 | 661 | 828531-828535 | 41, 115, 190, | 1381935 | 743 |
| | | | | 264, 412 | | |
| 25 | 652 | 697 | 828537-828547, | 42, 43, 116, | 1381953 | 748 |
| | | | 912256-912272, | 117, 191, 192, | | |
| | | | 912295-912297, | 265, 266, 338, | | |
| | | | 912303-912306 | 413,414, 478- | | |
| | | | | 487, 505-507, | | |
| | | | | 513-516 | | |
| 26 | 728 | 821 | 828550-828551 | 44, 118 | 1381982, 1381988, | 759, 760, 767, |
| | | | | | 1382012, 1382030 | 773 |
| 27 | 770 | 821 | 828551 | 118 | 1382012, 1382030 | 767,773 |
| 28 | 920 | 950 | 828769-878774 | 78, 154, 228, | 1382212 | 804 |
| | | | | 303, 376, 452 | | |
| 29 | 1006 | 1049 | 828790-828792 | 82, 157, 232 | 1382237, 1382243 | 807, 810 |
| 30 | 1152 | 1179 | 828565-828569 | 46, 120, 268, | n/a | n/a |
| | | | | 341, 417 | | |
| 31 | 1227 | 1274 | 699590,699592, | 17, 18, 48, 92, | 1381746 | 679 |
| | | | 699594,699596, | 122, 166, 270, | | |
| | | | 699600, | 271, 343, 344, | | |
| | | | 828577-828583 | 390, 419 | | |
| 32 | 1227 | 1265 | 699590, 699592, | 17, 48, 92, | n/a | n/a |
| | | | 699594, 699596, | 122, 166, 270, | | |
| | | | 828577-828583 | 271, 343, 344, | | |
| | | | | 390, 419 | | |
| 33 | 1268 | 1332 | 828584 | 197 | 1381751, 1381752, | 680, 681, 683 |
| | | | | | 1381756 | |
| 34 | 1268 | 1311 | n/a | n/a | 1381751, 1381752 | 680, 681 |
| 35 | 1289 | 1332 | 828584 | 197 | 1381752, 1381756 | 681, 683 |
| 36 | 1518 | 1543 | 828598-828602 | 51, 125, 200, | 1381828 | 706 |
| | | | | 274, 422 | | |
| 37 | 1531 | 1593 | 699631, | 19, 52, 53, | 1381835, 1381840 | 709, 710 |
| | | | 828604-828617 | 126-128, 201, | | |
| | | | | 202, 275, 276, | | |
| | | | | 349, 350, | | |
| | | | | 423-425 | | |
| 38 | 1544 | 1593 | 699631, | 19, 52, 53, | 1381840 | 710 |
| | | | 828605-828617 | 126-128, 201, | | |
| | | | | 202, 275, 276, | | |
| | | | | 349, 350, 424, | | |
| | | | | 425 | | |
| 39 | 1634 | 1657 | 828641-828643, | 207, 281, 354, | n/a | n/a |
| | | | 912285-912291, | 498-510 | | |
| | | | 912298-912300 | | | |
| 40 | 1778 | 1800 | 828656-828658 | 60, 135, 432 | n/a | n/a |
| 41 | 1882 | 1908 | 828674-828678 | 62, 138, 213, | n/a | n/a |
| | | | | 287, 360 | | |
| 42 | 2051 | 2074 | 828708-828710 | 68, 144, 441 | n/a | n/a |
| 43 | 2360 | 3117 | n/a | n/a | 1381981, 1381994, | 758, 761-766, |
| | | | | | 1381995, 1381998, | 769, 770, 772, |
| | | | | | 1381999, 1382004, | 774, 775, 777, |
| | | | | | 1382006, 1382019, | 779, 780-794, |
| | | | | | 1382020, 1382025, | 795-801 |
| | | | | | 1382033, 1382034, | |
| | | | | | 1382039, 1382051- | |
| | | | | | 1382054, 1382059, | |
| | | | | | 1382063, 1382069- | |
| | | | | | 1382071, 1382075, | |
| | | | | | 1382078, 1382080, | |
| | | | | | 1382087-1382090, | |
| | | | | | 1382103-1382107, | |
| | | | | | 1382116, 1382119 | |
| 44 | 2402 | 3117 | n/a | n/a | 1381995, 1381998, | 762-766, 769, |
| | | | | | 1381999, 1382004, | 770, 772, 774, |
| | | | | | 1382006, 1382019, | 775, 777, 779, |
| | | | | | 1382020, 1382025, | 780-794, |
| | | | | | 1382033, 1382034, | 795-801 |
| | | | | | 1382039, 1382051- | |
| | | | | | 1382054, 1382059, | |
| | | | | | 1382063, 1382069- | |
| | | | | | 1382071, 1382075, | |
| | | | | | 1382078, 1382080, | |
| | | | | | 1382087-1382090, | |
| | | | | | 1382103-1382107, | |
| | | | | | 1382116, 1382119 | |
| 45 | 2360 | 2655 | n/a | n/a | 1381981, 1381994, | 758, 761-766, |
| | | | | | 1381995, 1381998, | 769, 770, 772, |
| | | | | | 1381999, 1382004, | 774, 775, 777, |
| | | | | | 1382006, 1382019, | 779 |
| | | | | | 1382020, 1382025, | |
| | | | | | 1382033, 1382034, | |
| | | | | | 1382039, 1382051 | |
| 46 | 2402 | 2655 | n/a | n/a | 1381995, 1381998, | 762-766, 769, |
| | | | | | 1381999, 1382004, | 770, 772, 774, |
| | | | | | 1382006, 1382019, | 775, 777, 779 |
| | | | | | 1382020, 1382025, | |
| | | | | | 1382033, 1382034, | |
| | | | | | 1382039, 1382051 | |
| 47 | 2675 | 3054 | n/a | n/a | 1382052, 1382054, | 780, 782-794, |
| | | | | | 1382059, 1382063, | 795-797, 800 |
| | | | | | 1382069-1382071, | |
| | | | | | 1382075, 1382078, | |
| | | | | | 1382080, 1382087- | |
| | | | | | 1382090, 1382103- | |
| | | | | | 1382105, 1382116 | |

### Nonlimiting Disclosure and Incorporation by Reference

[0832] Each of the literature and patent publications listed herein is incorporated by reference in its entirety. While certain compounds, compositions and methods described herein have been described with specificity in accordance with certain embodiments, the following examples serve only to illustrate the compounds described herein and are not intended to limit the same. Each of the references, GenBank accession numbers, ENSEMBL identifiers, and the like recited in the present application is incorporated herein by reference in its entirety.

[0833] Although the sequence listing accompanying this filing identifies each sequence as either “RNA” or “DNA” as required, in reality, those sequences may be modified with any combination of chemical modifications. One of skill in the art will readily appreciate that such designation as “RNA” or “DNA” to describe modified oligonucleotides is, in certain instances, arbitrary. For example, an oligonucleotide comprising a nucleoside comprising a 2′-OH sugar moiety and a thymine base could be described as a DNA having a modified sugar (2′-OH in place of one 2′-H of DNA) or as an RNA having a modified base (thymine (methylated uracil) in place of an uracil of RNA). Accordingly, nucleic acid sequences provided herein, including, but not limited to those in the sequence listing, are intended to encompass nucleic acids containing any combination of natural or modified RNA and/or DNA, including, but not limited to such nucleic acids having modified nucleobases. By way of further example and without limitation, an oligomeric compound having the nucleobase sequence “ATCGATCG” encompasses any oligomeric compounds having such nucleobase sequence, whether modified or unmodified, including, but not limited to, such compounds comprising RNA bases, such as those having sequence “AUCGAUCG” and those having some DNA bases and some RNA bases such as “AUCGATCG” and oligomeric compounds having other modified nucleobases, such as “AT^{m}CGAUCG,” wherein mC indicates a cytosine base comprising a methyl group at the 5-position.

[0834] Certain compounds described herein (e.g., modified oligonucleotides) have one or more asymmetric center and thus give rise to enantiomers, diastereomers, and other stereoisomeric configurations that may be defined, in terms of absolute stereochemistry, as (R) or (S), as α or β such as for sugar anomers, or as (D) or (L), such as for amino acids, etc. Compounds provided herein that are drawn or described as having certain stereoisomeric configurations include only the indicated compounds. Compounds provided herein that are drawn or described with undefined stereochemistry include all such possible isomers, including their stereorandom and optically pure forms, unless specified otherwise. Likewise, tautomeric forms of the compounds herein are also included unless otherwise indicated. Unless otherwise indicated, compounds described herein are intended to include corresponding salt forms.

[0835] The compounds described herein include variations in which one or more atoms are replaced with a non-radioactive isotope or radioactive isotope of the indicated element. For example, compounds herein that comprise hydrogen atoms encompass all possible deuterium substitutions for each of the ¹H hydrogen atoms. Isotopic substitutions encompassed by the compounds herein include but are not limited to: ²H or ³H in place of ¹H, ¹³C or ¹⁴C in place of ¹²C, ¹⁵N in place of ¹⁴N, ¹⁷O or ¹⁸O in place of ¹⁶O, and ³³S, ³⁴S, ³⁵S, or ³⁶S in place of ³²S. In certain embodiments, non-radioactive isotopic substitutions may impart new properties on the oligomeric compound that are beneficial for use as a therapeutic or research tool. In certain embodiments, radioactive isotopic substitutions may make the compound suitable for research or diagnostic purposes such as imaging.

### EXAMPLES

[0836] The following examples illustrate certain embodiments of the present disclosure and are not limiting. Moreover, where specific embodiments are provided, the inventors have contemplated generic application of those specific embodiments. For example, disclosure of an oligonucleotide having a particular motif provides reasonable support for additional oligonucleotides having the same or similar motif. And, for example, where a particular high-affinity modification appears at a particular position, other high-affinity modifications at the same position are considered suitable, unless otherwise indicated.

### Example 1: Effect of Mixed Wing and Mixed Backbone Modified Oligonucleotides on Human APP RNA In Vitro, Single Dose

[0837] Modified oligonucleotides complementary to human APP nucleic acid were tested for their effect on APP RNA levels in vitro.

[0838] Modified oligonucleotides in the tables below are 18 nucleosides in length and have the sugar motif eeeeeddddddddkkeee, wherein each “e” is nucleoside comprising a 2′-MOE sugar moiety, each “k” is a nucleoside comprising a cEt sugar moiety, and each “d” is a nucleoside comprising a 2′-β-D-deoxyribosyl sugar moiety. The internucleoside linkage motif is sooosssssssssooss, wherein each “s” represents a phosphorothioate internucleoside linkage and each “o” represents a phosphodiester internucleoside linkage. All cytosine residues are 5-methylcytosines.

[0839] “Start site” indicates the 5′-most nucleoside to which the modified oligonucleotide is complementary in the human gene sequence. “Stop site” indicates the 3′-most nucleoside to which the modified oligonucleotide is complementary in the human gene sequence. Each modified oligonucleotide listed in the Tables below is 100% complementary to SEQ ID NO: 1 (the cDNA of Ensembl transcript ENST00000346798.7), the complement of SEQ ID NO: 2 (GENBANK Accession No. NC_000021.9 truncated from nucleotides 25878001 to 26174000), SEQ ID NO: 3 (the cDNA of Ensembl transcript ENST00000357903.7), SEQ ID NO: 4 (the cDNA of Ensembl transcript ENST00000348990.9), SEQ ID NO: 5 (the cDNA of Ensembl transcript ENST00000440126.7), SEQ ID NO: 6 (the cDNA of Ensembl transcript ENST00000354192.7), and/or SEQ ID NO: 7 (the cDNA of Ensembl transcript ENST00000358918.7). If a modified oligonucleotide is 100% complementary to SEQ ID NO: 1 and/or SEQ ID NO: 2, it may also be 100% complementary to any of SEQ ID NOs: 3-7, but this information is not displayed in the tables below. ‘N/A’ indicates that the modified oligonucleotide is not 100% complementary to that particular gene sequence.

[0840] Cultured SH-SY5Y cells at a density of 20,000 cells per well were treated with 7,000 nM of modified oligonucleotide by electroporation. After a treatment period of approximately 24 hours, total RNA was isolated from the cells and APP RNA levels were measured by quantitative real-time RTPCR. Human APP primer probe set HTS96 (forward sequence CCTTCCCGTGAATGGAGAGTT, designated herein as SEQ ID NO: 910; reverse sequence CACAGAGTCAGCCCCAAAAGA, designated herein as SEQ ID NO: 911; probe sequence CCTGGACGATCTCCAGCCGTGG, designated herein as SEQ ID NO: 912) was used to measure RNA levels. APP RNA levels were adjusted according to total RNA content, as measured by RIBOGREEN®. Results are presented in the tables below as percent APP RNA levels relative to untreated control cells.

TABLE 2
Reduction of APP RNA by 5-8-5 gapmers with mixed wings and a mixed backbone

| | SEQ ID | SEQ ID | SEQ ID | SEQ ID | | APP | |
|---|---|---|---|---|---|---|---|
| | NO: 1 | NO: 1 | NO: 2 | NO: 2 | | RNA | SEQ |
| Compound | Start | Stop | Start | Stop | | (% | ID |
| ID | Site | Site | Site | Site | Sequence (5’ to 3’) | control) | NO. |
| 699467 | 207 | 224 | 61970 | 61987 | CAATGCAGGTTTTGGTCC | 42 | 12 |
| 699501 | 308 | 325 | 83977 | 83994 | CCAGTTCTGGATGGTCAC | 40 | 13 |
| 699511 | 321 | 338 | 83990 | 84007 | GGCCCCGCTTGCACCAGT | 47 | 14 |
| 699519 | 331 | 348 | 84000 | 84017 | CACTGCTTGCGGCCCCGC | 36 | 15 |
| 699535 | 489 | 506 | N/A | N/A | ATGTCTCTTTGGCGACGG | 52 | 16 |
| 699594 | 1246 | 1263 | N/A | N/A | ATGACCTGGGACATTCTC | 26 | 17 |
| 699600 | 1257 | 1274 | 197971 | 197988 | CCCATTCTCTCATGACCT | 29 | 18 |
| 699631 | 1544 | 1561 | 218297 | 218314 | TAGGGTGTGCTGTCTGTC | 28 | 19 |
| 699660 | 1844 | 1861 | 262161 | 262178 | CACGGGAAGGAGCTCCAC | 69 | 20 |
| 828401 | 36 | 53 | 3382 | 3399 | GTGCCAAACCGGGCAGCA | 58 | 21 |
| 828407 | 61 | 78 | 3407 | 3424 | GCCGTCCAGGCGGCCAGC | 46 | 22 |
| 828413 | 83 | 100 | N/A | N/A | AGTGGGTACCTCCAGCGC | 54 | 23 |
| 828419 | 98 | 115 | 61861 | 61878 | GCCAGCATTACCATCAGT | 53 | 24 |
| 828430 | 224 | 241 | 61987 | 62004 | GATGCCTTCCTTGGTATC | 70 | 25 |
| 828436 | 246 | 263 | N/A | N/A | AGACTTCTTGGCAATACT | 24 | 26 |
| 828442 | 260 | 277 | 83929 | 83946 | CTGCAGTTCAGGGTAGAC | 28 | 27 |
| 828448 | 286 | 303 | 83955 | 83972 | TGGTTGGCTTCTACCACA | 54 | 28 |
| 828454 | 296 | 313 | 83965 | 83982 | GGTCACTGGTTGGTTGGC | 40 | 29 |
| 828464 | 341 | 358 | 84010 | 84027 | ATGGGTCTTGCACTGCTT | 19 | 30 |
| 828470 | 370 | 387 | 84039 | 84056 | AAGCAGCGGTAGGGAATC | 49 | 31 |
| 828476 | 379 | 396 | N/A | N/A | TCACCAACTAAGCAGCGG | 70 | 32 |
| 828482 | 422 | 439 | 120685 | 120702 | GAATTTGCACTTGTCAGG | 36 | 33 |
| 828488 | 451 | 468 | 120714 | 120731 | TCGCAAACATCCATCCTC | 32 | 34 |
| 828494 | 466 | 483 | 120729 | 120746 | CAGTGAAGATGAGTTTCG | 73 | 35 |
| 828502 | 516 | 533 | 122821 | 122838 | CATGCAAGTTGGTACTCT | 36 | 36 |
| 828508 | 533 | 550 | 122838 | 122855 | CAGCAACATGCCGTAGTC | 30 | 37 |
| 828514 | 549 | 566 | 122854 | 122871 | TGTCAATTCCGCAGGGCA | 60 | 38 |
| 828520 | 563 | 580 | 122868 | 122885 | TACCCCTCGGAACTTGTC | 38 | 39 |
| 828526 | 589 | 606 | 122894 | 122911 | TCAGCCAGTGGGCAACAC | 29 | 40 |
| 828532 | 638 | 655 | 122943 | 122960 | ATCCGAGTCATCCTCCTC | 19 | 41 |
| 828538 | 654 | 671 | 122959 | 122976 | CTCCGCCCCACCAGACAT | 46 | 42 |
| 828544 | 674 | 691 | 122979 | 122996 | ATCTGCATAGTCTGTGTC | 47 | 43 |
| 828550 | 752 | 769 | 152014 | 152031 | GTCATCATCGGCTTCTTC | 24 | 44 |
| 828562 | 1130 | 1147 | 191529 | 191546 | GGTACTGGCTGCTGTTGT | 26 | 45 |
| 828568 | 1159 | 1176 | 191558 | 191575 | GTCTCGAGATACTTGTCA | 42 | 46 |
| 828574 | 1186 | 1203 | 191585 | 191602 | TGGGCATGTTCATTCTCA | 15 | 47 |
| 828580 | 1233 | 1250 | 191632 | 191649 | TTCTCTCTCGGTGCTTGG | 31 | 48 |
| 828587 | 1453 | 1470 | 198892 | 198909 | GCGGTGATGTAGTTCTCC | 35 | 49 |
| 828593 | 1476 | 1493 | N/A | N/A | GCCGAGGAGGAACAGCCT | 46 | 50 |
| 828599 | 1520 | 1537 | 218273 | 218290 | TTCTGCGCGGACATACTT | 49 | 51 |
| 828610 | 1564 | 1581 | 218317 | 218334 | CGCACATGCTCGAAATGC | 20 | 52 |
| 828616 | 1575 | 1592 | 218328 | 218345 | GATCCACCATGCGCACAT | 48 | 53 |
| 828622 | 1586 | 1603 | 218339 | 218356 | GGCTTTCTTGGGATCCAC | 42 | 54 |
| 828628 | 1598 | 1615 | 218351 | 218368 | CCGGATCTGAGCGGCTTT | 46 | 55 |
| 828634 | 1605 | 1622 | 218358 | 218375 | CCTGGGACCGGATCTGAG | 37 | 56 |
| 828639 | 1629 | 1646 | 219319 | 219336 | AAATCACACGGAGGTGTG | 72 | 57 |
| 828645 | 1648 | 1665 | 219338 | 219355 | GACTGATTCATGCGCTCA | 13 | 58 |
| 828651 | 1765 | 1782 | 262082 | 262099 | TCACTAATCATGTTGGCC | 45 | 59 |
| 828657 | 1781 | 1798 | 262098 | 262115 | GTAACTGATCCTTGGTTC | 42 | 60 |
| 828663 | 1816 | 1833 | 262133 | 262150 | GTTTCGGTCAAAGATGGC | 44 | 61 |
| 828674 | 1882 | 1899 | 262199 | 262216 | TGCCACGGCTGGAGATCG | 57 | 62 |
| 828680 | 1947 | 1964 | 268927 | 268944 | GGCGGGCATCAACAGGCT | 99 | 63 |
| 828686 | 1970 | 1987 | 268950 | 268967 | GGTCAGTCCTCGGTCGGC | 106 | 64 |
| 828692 | 1979 | 1996 | 268959 | 268976 | TGGTCGAGTGGTCAGTCC | 71 | 65 |
| 828697 | 1988 | 2005 | N/A | N/A | CCCAGAACCTGGTCGAGT | 86 | 66 |
| 828703 | 2017 | 2034 | 276347 | 276364 | GAGATCTCCTCCGTCTTG | 57 | 67 |
| 828709 | 2053 | 2070 | 276383 | 276400 | GAGTCATGTCGGAATTCT | 42 | 68 |
| 828715 | 2070 | 2087 | 276400 | 276417 | GATGAACTTCATATCCTG | 70 | 69 |
| 828721 | 2128 | 2145 | 282162 | 282179 | CCAATGATTGCACCTTTG | 43 | 70 |
| 828727 | 2141 | 2158 | 282175 | 282192 | GCCCACCATGAGTCCAAT | 54 | 71 |
| 828733 | 2153 | 2170 | 282187 | 282204 | TATGACAACACCGCCCAC | 70 | 72 |
| 828739 | 2173 | 2190 | 282207 | 282224 | GTGATGACGATCACTGTC | 74 | 73 |
| 828745 | 2286 | 2303 | 292270 | 292287 | AGCCGTTCTGCTGCATCT | 79 | 74 |
| 828751 | 885 | 902 | N/A | N/A | CCTCTCGAACCACCTCTT | 65 | 75 |
| 828757 | 897 | 914 | N/A | N/A | GTTCAGAGCACACCTCTC | 35 | 76 |
| 828763 | 910 | 927 | 173829 | 173846 | CCCGTCTCGGCTTGTTCA | 46 | 77 |
| 828769 | 920 | 937 | 173839 | 173856 | TCGGCACGGCCCCGTCTC | 55 | 78 |
| 828775 | 934 | 951 | 173853 | 173870 | CGGGAGATCATTGCTCGG | 78 | 79 |
| 828781 | 946 | 963 | 173865 | 173882 | TCAAAGTACCAGCGGGAG | 58 | 80 |
| 828785 | 989 | 1006 | 173908 | 173925 | ACATCCGCCGTAAAAGAA | 69 | 81 |
| 828790 | 1015 | 1032 | 173934 | 173951 | GTGTCAAAGTTGTTCCGG | 46 | 82 |
| 828796 | 1038 | 1055 | 173957 | 173974 | ACACGGCCATGCAGTACT | 46 | 83 |
| 828802 | 1069 | 1086 | 176586 | 176603 | TTGAGTAAACTTTGGGAC | 69 | 84 |
| 828808 | 1094 | 1111 | 176611 | 176628 | TCGGGCAAGAGGTTCCTG | 77 | 85 |
| 828814 | 1102 | 1119 | 176619 | 176636 | ACAGGATCTCGGGCAAGA | 42 | 86 |
| 828820 | N/A | N/A | 33811 | 33828 | ACAAGTCCTCTAATTGGT | 56 | 87 |

TABLE 3
Reduction of APP RNA by 5-8-5 gapmers with mixed wings and a mixed backbone

| | SEQ ID | SEQ ID | SEQ ID | SEQ ID | | APP | |
|---|---|---|---|---|---|---|---|
| | NO: 1 | NO: 1 | NO: 2 | NO: 2 | | RNA | SEQ |
| Compound | Start | Stop | Start | Stop | | (% | ID |
| ID | Site | Site | Site | Site | Sequence (5’ to 3’) | control) | NO. |
| 699503 | 311 | 328 | 83980 | 83997 | GCACCAGTTCTGGATGGT | 49 | 88 |
| 699512 | 323 | 340 | 83992 | 84009 | GCGGCCCCGCTTGCACCA | 77 | 89 |
| 699537 | 491 | 508 | N/A | N/A | GCATGTCTCTTTGGCGAC | 72 | 90 |
| 699568 | 948 | 965 | 173867 | 173884 | CATCAAAGTACCAGCGGG | 70 | 91 |
| 699596 | 1248 | 1265 | N/A | N/A | TCATGACCTGGGACATTC | 48 | 92 |
| 699600 | 1257 | 1274 | 197971 | 197988 | CCCATTCTCTCATGACCT | 34 | 18 |
| 828402 | 38 | 55 | 3384 | 3401 | CAGTGCCAAACCGGGCAG | 69 | 93 |
| 828408 | 63 | 80 | 3409 | 3426 | GAGCCGTCCAGGCGGCCA | 80 | 94 |
| 828414 | 84 | 101 | N/A | N/A | CAGTGGGTACCTCCAGCG | 59 | 95 |
| 828420 | 112 | 129 | 61875 | 61892 | GGTTCAGCCAGCAGGCCA | 39 | 96 |
| 828425 | 212 | 229 | 61975 | 61992 | GGTATCAATGCAGGTTTT | 25 | 97 |
| 828431 | 225 | 242 | 61988 | 62005 | GGATGCCTTCCTTGGTAT | 63 | 98 |
| 828437 | 250 | 267 | N/A | N/A | GGGTAGACTTCTTGGCAA | 38 | 99 |
| 828443 | 265 | 282 | 83934 | 83951 | GTGATCTGCAGTTCAGGG | 22 | 100 |
| 828449 | 288 | 305 | 83957 | 83974 | GTTGGTTGGCTTCTACCA | 47 | 101 |
| 828455 | 300 | 317 | 83969 | 83986 | GGATGGTCACTGGTTGGT | 24 | 102 |
| 828459 | 332 | 349 | 84001 | 84018 | GCACTGCTTGCGGCCCCG | 36 | 103 |
| 828465 | 343 | 360 | 84012 | 84029 | GGATGGGTCTTGCACTGC | 39 | 104 |
| 828471 | 372 | 389 | 84041 | 84058 | CTAAGCAGCGGTAGGGAA | 70 | 105 |
| 828477 | 381 | 398 | N/A | N/A | ACTCACCAACTAAGCAGC | 52 | 106 |
| 828483 | 429 | 446 | 120692 | 120709 | GGTGTAAGAATTTGCACT | 61 | 107 |
| 828489 | 453 | 470 | 120716 | 120733 | TTTCGCAAACATCCATCC | 49 | 108 |
| 828495 | 473 | 490 | 120736 | 120753 | GGTGTGCCAGTGAAGATG | 64 | 109 |
| 828503 | 524 | 541 | 122829 | 122846 | GCCGTAGTCATGCAAGTT | 37 | 110 |
| 828509 | 540 | 557 | 122845 | 122862 | CGCAGGGCAGCAACATGC | 31 | 111 |
| 828515 | 551 | 568 | 122856 | 122873 | CTTGTCAATTCCGCAGGG | 74 | 112 |
| 828521 | 564 | 581 | 122869 | 122886 | CTACCCCTCGGAACTTGT | 67 | 113 |
| 828527 | 621 | 638 | 122926 | 122943 | CCGCATCAGCAGAATCCA | 24 | 114 |
| 828533 | 639 | 656 | 122944 | 122961 | CATCCGAGTCATCCTCCT | 16 | 115 |
| 828539 | 657 | 674 | 122962 | 122979 | CTGCTCCGCCCCACCAGA | 47 | 116 |
| 828545 | 676 | 693 | 122981 | 122998 | CCATCTGCATAGTCTGTG | 24 | 117 |
| 828551 | 804 | 821 | 152066 | 152083 | CGTAGGGTTCCTCAGCCT | 42 | 118 |
| 828563 | 1131 | 1148 | 191530 | 191547 | GGGTACTGGCTGCTGTTG | 41 | 119 |
| 828569 | 1162 | 1179 | 191561 | 191578 | GGTGTCTCGAGATACTTG | 52 | 120 |
| 828575 | 1224 | 1241 | 191623 | 191640 | GGTGCTTGGCCTCAAGCC | 71 | 121 |
| 828581 | 1235 | 1252 | 191634 | 191651 | CATTCTCTCTCGGTGCTT | 67 | 122 |
| 828588 | 1455 | 1472 | 198894 | 198911 | GAGCGGTGATGTAGTTCT | 65 | 123 |
| 828594 | 1485 | 1502 | N/A | N/A | CGTGACGAGGCCGAGGAG | 88 | 124 |
| 828600 | 1521 | 1538 | 218274 | 218291 | GTTCTGCGCGGACATACT | 35 | 125 |
| 828605 | 1546 | 1563 | 218299 | 218316 | TTTAGGGTGTGCTGTCTG | 29 | 126 |
| 828611 | 1566 | 1583 | 218319 | 218336 | TGCGCACATGCTCGAAAT | 52 | 127 |
| 828617 | 1576 | 1593 | 218329 | 218346 | GGATCCACCATGCGCACA | 46 | 128 |
| 828623 | 1588 | 1605 | 218341 | 218358 | GCGGCTTTCTTGGGATCC | 60 | 129 |
| 828629 | 1599 | 1616 | 218352 | 218369 | ACCGGATCTGAGCGGCTT | 50 | 130 |
| 828635 | 1607 | 1624 | N/A | N/A | AACCTGGGACCGGATCTG | 69 | 131 |
| 828640 | 1632 | 1649 | 219322 | 219339 | CATAAATCACACGGAGGT | 61 | 132 |
| 828646 | 1650 | 1667 | 219340 | 219357 | GAGACTGATTCATGCGCT | 30 | 133 |
| 828652 | 1768 | 1785 | 262085 | 262102 | GGTTCACTAATCATGTTG | 50 | 134 |
| 828658 | 1783 | 1800 | 262100 | 262117 | CCGTAACTGATCCTTGGT | 43 | 135 |
| 828664 | 1833 | 1850 | 262150 | 262167 | GCTCCACGGTGGTTTTCG | 69 | 136 |
| 828669 | 1848 | 1865 | 262165 | 262182 | CATTCACGGGAAGGAGCT | 39 | 137 |
| 828675 | 1883 | 1900 | 262200 | 262217 | ATGCCACGGCTGGAGATC | 43 | 138 |
| 828681 | 1961 | 1978 | 268941 | 268958 | TCGGTCGGCAGCAGGGCG | 98 | 139 |
| 828687 | 1971 | 1988 | 268951 | 268968 | TGGTCAGTCCTCGGTCGG | 87 | 140 |
| 828693 | 1981 | 1998 | 268961 | 268978 | CCTGGTCGAGTGGTCAGT | 91 | 141 |
| 828698 | 1991 | 2008 | N/A | N/A | CAACCCAGAACCTGGTCG | 88 | 142 |
| 828704 | 2019 | 2036 | 276349 | 276366 | CAGAGATCTCCTCCGTCT | 46 | 143 |
| 828710 | 2057 | 2074 | 276387 | 276404 | TCCTGAGTCATGTCGGAA | 49 | 144 |
| 828716 | 2073 | 2090 | 276403 | 276420 | GATGATGAACTTCATATC | 80 | 145 |
| 828722 | 2130 | 2147 | 282164 | 282181 | GTCCAATGATTGCACCTT | 51 | 146 |
| 828728 | 2143 | 2160 | 282177 | 282194 | CCGCCCACCATGAGTCCA | 91 | 147 |
| 828734 | 2155 | 2172 | 282189 | 282206 | GCTATGACAACACCGCCC | 41 | 148 |
| 828740 | 2175 | 2192 | 282209 | 282226 | AGGTGATGACGATCACTG | 75 | 149 |
| 828746 | 2288 | 2305 | 292272 | 292289 | GTAGCCGTTCTGCTGCAT | 85 | 150 |
| 828752 | 887 | 904 | N/A | N/A | CACCTCTCGAACCACCTC | 49 | 151 |
| 828758 | 900 | 917 | 173819 | 173836 | CTTGTTCAGAGCACACCT | 55 | 152 |
| 828764 | 912 | 929 | 173831 | 173848 | GCCCCGTCTCGGCTTGTT | 42 | 153 |
| 828770 | 924 | 941 | 173843 | 173860 | TTGCTCGGCACGGCCCCG | 33 | 154 |
| 828776 | 935 | 952 | 173854 | 173871 | GCGGGAGATCATTGCTCG | 53 | 155 |
| 828786 | 992 | 1009 | 173911 | 173928 | GCCACATCCGCCGTAAAA | 72 | 156 |
| 828791 | 1017 | 1034 | 173936 | 173953 | CTGTGTCAAAGTTGTTCC | 38 | 157 |
| 828797 | 1039 | 1056 | 173958 | 173975 | CACACGGCCATGCAGTAC | 38 | 158 |
| 828803 | 1077 | 1094 | 176594 | 176611 | GGGTAGTCTTGAGTAAAC | 54 | 159 |
| 828809 | 1095 | 1112 | 176612 | 176629 | CTCGGGCAAGAGGTTCCT | 90 | 160 |
| 828815 | 1105 | 1122 | 176622 | 176639 | TTAACAGGATCTCGGGCA | 58 | 161 |
| 828821 | N/A | N/A | 33815 | 33832 | ACCAACAAGTCCTCTAAT | 105 | 162 |

TABLE 4
Reduction of APP RNA by 5-8-5 gapmers with mixed wings and a mixed backbone

| | SEQ ID | SEQ ID | SEQ ID | SEQ ID | | APP | |
|---|---|---|---|---|---|---|---|
| | NO: 1 | NO: 1 | NO: 2 | NO: 2 | | RNA | SEQ |
| Compound | Start | Stop | Start | Stop | | (% | ID |
| ID | Site | Site | Site | Site | Sequence (5’ to 3’) | control) | NO: |
| 699505 | 313 | 330 | 83982 | 83999 | TTGCACCAGTTCTGGATG | 53 | 163 |
| 699514 | 325 | 342 | 83994 | 84011 | TTGCGGCCCCGCTTGCAC | 61 | 164 |
| 699539 | 493 | 510 | N/A | N/A | CTGCATGTCTCTTTGGCG | 42 | 165 |
| 699590 | 1237 | 1254 | 191636 | 191653 | GACATTCTCTCTCGGTGC | 66 | 166 |
| 699600 | 1257 | 1274 | 197971 | 197988 | CCCATTCTCTCATGACCT | 60 | 18 |
| 699669 | 1983 | 2000 | N/A | N/A | AACCTGGTCGAGTGGTCA | 166 | 167 |
| 828403 | 39 | 56 | 3385 | 3402 | GCAGTGCCAAACCGGGCA | 73 | 168 |
| 828409 | 66 | 83 | 3412 | 3429 | CCCGAGCCGTCCAGGCGG | 70 | 169 |
| 828415 | 86 | 103 | N/A | N/A | ATCAGTGGGTACCTCCAG | 56 | 170 |
| 828421 | 129 | 146 | 61892 | 61909 | AGAACATGGCAATCTGGG | 45 | 171 |
| 828426 | 214 | 231 | 61977 | 61994 | TTGGTATCAATGCAGGTT | 37 | 172 |
| 828432 | 233 | 250 | 61996 | 62013 | ATACTGCAGGATGCCTTC | 108 | 173 |
| 828438 | 251 | 268 | N/A | N/A | AGGGTAGACTTCTTGGCA | 54 | 174 |
| 828444 | 266 | 283 | 83935 | 83952 | GGTGATCTGCAGTTCAGG | 19 | 175 |
| 828450 | 289 | 306 | 83958 | 83975 | GGTTGGTTGGCTTCTACC | 52 | 176 |
| 828456 | 302 | 319 | 83971 | 83988 | CTGGATGGTCACTGGTTG | 38 | 177 |
| 828460 | 334 | 351 | 84003 | 84020 | TTGCACTGCTTGCGGCCC | 40 | 178 |
| 828466 | 361 | 378 | 84030 | 84047 | TAGGGAATCACAAAGTGG | 62 | 179 |
| 828472 | 373 | 390 | N/A | N/A | ACTAAGCAGCGGTAGGGA | 63 | 180 |
| 828478 | 409 | 426 | 120672 | 120689 | TCAGGAACGAGAAGGGCA | 67 | 181 |
| 828484 | 432 | 449 | 120695 | 120712 | CCTGGTGTAAGAATTTGC | 38 | 182 |
| 828490 | 456 | 473 | 120719 | 120736 | GAGTTTCGCAAACATCCA | 26 | 183 |
| 828496 | 474 | 491 | 120737 | 120754 | CGGTGTGCCAGTGAAGAT | 98 | 184 |
| 828504 | 525 | 542 | 122830 | 122847 | TGCCGTAGTCATGCAAGT | 82 | 185 |
| 828510 | 541 | 558 | 122846 | 122863 | CCGCAGGGCAGCAACATG | 76 | 186 |
| 828516 | 555 | 572 | 122860 | 122877 | GGAACTTGTCAATTCCGC | 115 | 187 |
| 828522 | 567 | 584 | 122872 | 122889 | ACTCTACCCCTCGGAACT | 101 | 188 |
| 828528 | 624 | 641 | 122929 | 122946 | CCTCCGCATCAGCAGAAT | 24 | 189 |
| 828534 | 643 | 660 | 122948 | 122965 | CAGACATCCGAGTCATCC | 45 | 190 |
| 828540 | 662 | 679 | 122967 | 122984 | TGTGTCTGCTCCGCCCCA | 49 | 191 |
| 828546 | 677 | 694 | 122982 | 122999 | CCCATCTGCATAGTCTGT | 33 | 192 |
| 828552 | 881 | 898 | 152143 | 152160 | TCGAACCACCTCTTCCAC | 88 | 193 |
| 828564 | 1147 | 1164 | 191546 | 191563 | TTGTCAACGGCATCAGGG | 88 | 194 |
| 828570 | 1164 | 1181 | 191563 | 191580 | CAGGTGTCTCGAGATACT | 80 | 195 |
| 828576 | 1225 | 1242 | 191624 | 191641 | CGGTGCTTGGCCTCAAGC | 88 | 196 |
| 828584 | 1315 | 1332 | 198029 | 198046 | TGGATAACTGCCTTCTTA | 150 | 197 |
| 828589 | 1457 | 1474 | 198896 | 198913 | CAGAGCGGTGATGTAGTT | 74 | 198 |
| 828595 | 1512 | 1529 | 218265 | 218282 | GGACATACTTCTTTAGCA | 67 | 199 |
| 828601 | 1524 | 1541 | 218277 | 218294 | TCTGTTCTGCGCGGACAT | 55 | 200 |
| 828606 | 1548 | 1565 | 218301 | 218318 | GCTTTAGGGTGTGCTGTC | 36 | 201 |
| 828612 | 1568 | 1585 | 218321 | 218338 | CATGCGCACATGCTCGAA | 48 | 202 |
| 828618 | 1577 | 1594 | 218330 | 218347 | GGGATCCACCATGCGCAC | 68 | 203 |
| 828624 | 1590 | 1607 | 218343 | 218360 | GAGCGGCTTTCTTGGGAT | 106 | 204 |
| 828630 | 1600 | 1617 | 218353 | 218370 | GACCGGATCTGAGCGGCT | 75 | 205 |
| 828636 | 1608 | 1625 | N/A | N/A | TAACCTGGGACCGGATCT | 105 | 206 |
| 828641 | 1635 | 1652 | 219325 | 219342 | GCTCATAAATCACACGGA | 40 | 207 |
| 828647 | 1684 | 1701 | 219374 | 219391 | TCGGCCACTGCAGGCACG | 87 | 208 |
| 828653 | 1771 | 1788 | 262088 | 262105 | CTTGGTTCACTAATCATG | 70 | 209 |
| 828659 | 1784 | 1801 | 262101 | 262118 | TCCGTAACTGATCCTTGG | 78 | 210 |
| 828665 | 1837 | 1854 | 262154 | 262171 | AGGAGCTCCACGGTGGTT | 165 | 211 |
| 828670 | 1849 | 1866 | 262166 | 262183 | CCATTCACGGGAAGGAGC | 31 | 212 |
| 828676 | 1885 | 1902 | 262202 | 262219 | GAATGCCACGGCTGGAGA | 17 | 213 |
| 828682 | 1963 | 1980 | 268943 | 268960 | CCTCGGTCGGCAGCAGGG | 151 | 214 |
| 828688 | 1973 | 1990 | 268953 | 268970 | AGTGGTCAGTCCTCGGTC | 97 | 215 |
| 828699 | 2001 | 2018 | 276331 | 276348 | TGATATTTGTCAACCCAG | 51 | 216 |
| 828705 | 2021 | 2038 | 276351 | 276368 | TTCAGAGATCTCCTCCGT | 101 | 217 |
| 828711 | 2058 | 2075 | 276388 | 276405 | ATCCTGAGTCATGTCGGA | 88 | 218 |
| 828717 | 2117 | 2134 | 282151 | 282168 | ACCTTTGTTTGAACCCAC | 47 | 219 |
| 828723 | 2132 | 2149 | 282166 | 282183 | GAGTCCAATGATTGCACC | 92 | 220 |
| 828729 | 2146 | 2163 | 282180 | 282197 | ACACCGCCCACCATGAGT | 94 | 221 |
| 828735 | 2157 | 2174 | 282191 | 282208 | TCGCTATGACAACACCGC | 47 | 222 |
| 828741 | 2209 | 2226 | 282243 | 282260 | ATGGATGTGTACTGTTTC | 46 | 223 |
| 828747 | 2289 | 2306 | 292273 | 292290 | CGTAGCCGTTCTGCTGCA | 157 | 224 |
| 828753 | 889 | 906 | N/A | N/A | CACACCTCTCGAACCACC | 56 | 225 |
| 828759 | 901 | 918 | 173820 | 173837 | GCTTGTTCAGAGCACACC | 63 | 226 |
| 828765 | 914 | 931 | 173833 | 173850 | CGGCCCCGTCTCGGCTTG | 119 | 227 |
| 828771 | 926 | 943 | 173845 | 173862 | CATTGCTCGGCACGGCCC | 59 | 228 |
| 828777 | 937 | 954 | 173856 | 173873 | CAGCGGGAGATCATTGCT | 75 | 229 |
| 828782 | 952 | 969 | 173871 | 173888 | GTCACATCAAAGTACCAG | 53 | 230 |
| 828787 | 993 | 1010 | 173912 | 173929 | CGCCACATCCGCCGTAAA | 100 | 231 |
| 828792 | 1032 | 1049 | 173951 | 173968 | CCATGCAGTACTCTTCTG | 87 | 232 |
| 828798 | 1041 | 1058 | 173960 | 173977 | CACACACGGCCATGCAGT | 80 | 233 |
| 828804 | 1080 | 1097 | 176597 | 176614 | CCTGGGTAGTCTTGAGTA | 114 | 234 |
| 828810 | 1097 | 1114 | 176614 | 176631 | ATCTCGGGCAAGAGGTTC | 69 | 235 |
| 828816 | 1108 | 1125 | N/A | N/A | AGTTTAACAGGATCTCGG | 71 | 236 |

TABLE 5
Reduction of APP RNA by 5-8-5 gapmers with mixed wings and a mixed backbone

| | SEQ ID | SEQ ID | SEQ ID | SEQ ID | | APP | |
|---|---|---|---|---|---|---|---|
| | NO: 1 | NO: 1 | NO: 2 | NO: 2 | | RNA | SEQ |
| Compound | Start | Stop | Start | Stop | | (% | ID |
| ID | Site | Site | Site | Site | Sequence (5′ to 3′) | control) | NO. |
| 699506 | 314 | 331 | 83983 | 84000 | CTTGCACCAGTTCTGGAT | 60 | 237 |
| 699516 | 327 | 344 | 83996 | 84013 | GCTTGCGGCCCCGCTTGC | 85 | 238 |
| 699573 | 995 | 1012 | 173914 | 173931 | GCCGCCACATCCGCCGTA | 97 | 239 |
| 699600 | 1257 | 1274 | 197971 | 197988 | CCCATTCTCTCATGACCT | 57 | 18 |
| 699623 | 1428 | 1445 | 198867 | 198884 | GGCGGCGGCGGTCATTGA | 105 | 240 |
| 828404 | 40 | 57 | 3386 | 3403 | AGCAGTGCCAAACCGGGC | 26 | 241 |
| 828410 | 67 | 84 | 3413 | 3430 | GCCCGAGCCGTCCAGGCG | 66 | 242 |
| 828416 | 89 | 106 | N/A | N/A | ACCATCAGTGGGTACCTC | 46 | 243 |
| 828422 | 150 | 167 | 61913 | 61930 | TGTGCATGTTCAGTCTGC | 23 | 244 |
| 828427 | 216 | 233 | 61979 | 61996 | CCTTGGTATCAATGCAGG | 45 | 245 |
| 828433 | 235 | 252 | 61998 | 62015 | CAATACTGCAGGATGCCT | 80 | 246 |
| 828439 | 252 | 269 | N/A | N/A | CAGGGTAGACTTCTTGGC | 104 | 247 |
| 828445 | 267 | 284 | 83936 | 83953 | TGGTGATCTGCAGTTCAG | 31 | 248 |
| 828451 | 291 | 308 | 83960 | 83977 | CTGGTTGGTTGGCTTCTA | 48 | 249 |
| 828457 | 304 | 321 | 83973 | 83990 | TTCTGGATGGTCACTGGT | 54 | 250 |
| 828461 | 335 | 352 | 84004 | 84021 | CTTGCACTGCTTGCGGCC | 48 | 251 |
| 828467 | 366 | 383 | 84035 | 84052 | AGCGGTAGGGAATCACAA | 58 | 252 |
| 828473 | 375 | 392 | N/A | N/A | CAACTAAGCAGCGGTAGG | 61 | 253 |
| 828479 | 410 | 427 | 120673 | 120690 | GTCAGGAACGAGAAGGGC | 117 | 254 |
| 828485 | 437 | 454 | 120700 | 120717 | CCTCTCCTGGTGTAAGAA | 42 | 255 |
| 828491 | 460 | 477 | 120723 | 120740 | AGATGAGTTTCGCAAACA | 52 | 256 |
| 828497 | 477 | 494 | 120740 | 120757 | CGACGGTGTGCCAGTGAA | 35 | 257 |
| 828499 | 506 | 523 | 122811 | 122828 | GGTACTCTTCTCACTGCA | 32 | 258 |
| 828505 | 527 | 544 | 122832 | 122849 | CATGCCGTAGTCATGCAA | 66 | 259 |
| 828511 | 543 | 560 | 122848 | 122865 | TTCCGCAGGGCAGCAACA | 57 | 260 |
| 828517 | 557 | 574 | 122862 | 122879 | TCGGAACTTGTCAATTCC | 82 | 261 |
| 828523 | 568 | 585 | 122873 | 122890 | AACTCTACCCCTCGGAAC | 79 | 262 |
| 828529 | 633 | 650 | 122938 | 122955 | AGTCATCCTCCTCCGCAT | 81 | 263 |
| 828535 | 644 | 661 | 122949 | 122966 | CCAGACATCCGAGTCATC | 40 | 264 |
| 828541 | 664 | 681 | 122969 | 122986 | TCTGTGTCTGCTCCGCCC | 33 | 265 |
| 828547 | 680 | 697 | N/A | N/A | ACTCCCATCTGCATAGTC | 43 | 266 |
| 828553 | 882 | 899 | 152144 | 152161 | CTCGAACCACCTCTTCCA | 100 | 267 |
| 828565 | 1152 | 1169 | 191551 | 191568 | GATACTTGTCAACGGCAT | 22 | 268 |
| 828571 | 1167 | 1184 | 191566 | 191583 | CCCCAGGTGTCTCGAGAT | 50 | 269 |
| 828577 | 1227 | 1244 | 191626 | 191643 | CTCGGTGCTTGGCCTCAA | 44 | 270 |
| 828582 | 1238 | 1255 | 191637 | 191654 | GGACATTCTCTCTCGGTG | 40 | 271 |
| 828590 | 1461 | 1478 | 198900 | 198917 | CCTGCAGAGCGGTGATGT | 98 | 272 |
| 828596 | 1515 | 1532 | 218268 | 218285 | CGCGGACATACTTCTTTA | 54 | 273 |
| 828602 | 1526 | 1543 | 218279 | 218296 | CTTCTGTTCTGCGCGGAC | 51 | 274 |
| 828607 | 1550 | 1567 | 218303 | 218320 | ATGCTTTAGGGTGTGCTG | 66 | 275 |
| 828613 | 1569 | 1586 | 218322 | 218339 | CCATGCGCACATGCTCGA | 67 | 276 |
| 828619 | 1579 | 1596 | 218332 | 218349 | TTGGGATCCACCATGCGC | 64 | 277 |
| 828625 | 1592 | 1609 | 218345 | 218362 | CTGAGCGGCTTTCTTGGG | 84 | 278 |
| 828631 | 1601 | 1618 | 218354 | 218371 | GGACCGGATCTGAGCGGC | 62 | 279 |
| 828637 | 1610 | 1627 | N/A | N/A | CATAACCTGGGACCGGAT | 38 | 280 |
| 828642 | 1637 | 1654 | 219327 | 219344 | GCGCTCATAAATCACACG | 55 | 281 |
| 828648 | 1692 | 1709 | 219382 | 219399 | GAATCTCCTCGGCCACTG | 38 | 282 |
| 828654 | 1773 | 1790 | 262090 | 262107 | TCCTTGGTTCACTAATCA | 67 | 283 |
| 828660 | 1788 | 1805 | 262105 | 262122 | CGTTTCCGTAACTGATCC | 83 | 284 |
| 828666 | 1839 | 1856 | 262156 | 262173 | GAAGGAGCTCCACGGTGG | 139 | 285 |
| 828671 | 1851 | 1868 | 262168 | 262185 | CTCCATTCACGGGAAGGA | 35 | 286 |
| 828677 | 1887 | 1904 | 262204 | 262221 | AAGAATGCCACGGCTGGA | 25 | 287 |
| 828683 | 1965 | 1982 | 268945 | 268962 | GTCCTCGGTCGGCAGCAG | 198 | 288 |
| 828689 | 1975 | 1992 | 268955 | 268972 | CGAGTGGTCAGTCCTCGG | 130 | 289 |
| 828694 | 1984 | 2001 | N/A | N/A | GAACCTGGTCGAGTGGTC | 131 | 290 |
| 828700 | 2010 | 2027 | 276340 | 276357 | CCTCCGTCTTGATATTTG | 291 | 291 |
| 828706 | 2046 | 2063 | 276376 | 276393 | GTCGGAATTCTGCATCCA | 50 | 292 |
| 828712 | 2059 | 2076 | 276389 | 276406 | TATCCTGAGTCATGTCGG | 84 | 293 |
| 828718 | 2119 | 2136 | 282153 | 282170 | GCACCTTTGTTTGAACCC | 48 | 294 |
| 828724 | 2134 | 2151 | 282168 | 282185 | ATGAGTCCAATGATTGCA | 55 | 295 |
| 828730 | 2147 | 2164 | 282181 | 282198 | AACACCGCCCACCATGAG | 113 | 296 |
| 828736 | 2162 | 2179 | 282196 | 282213 | CACTGTCGCTATGACAAC | 139 | 297 |
| 828742 | 2223 | 2240 | 282257 | 282274 | CCACACCATGATGAATGG | 84 | 298 |
| 828748 | 2305 | 2322 | 292289 | 292306 | TTGTAGGTTGGATTTTCG | 76 | 299 |
| 828754 | 890 | 907 | N/A | N/A | GCACACCTCTCGAACCAC | 71 | 300 |
| 828760 | 904 | 921 | 173823 | 173840 | TCGGCTTGTTCAGAGCAC | 90 | 301 |
| 828766 | 916 | 933 | 173835 | 173852 | CACGGCCCCGTCTCGGCT | 71 | 302 |
| 828772 | 928 | 945 | 173847 | 173864 | ATCATTGCTCGGCACGGC | 45 | 303 |
| 828778 | 940 | 957 | 173859 | 173876 | TACCAGCGGGAGATCATT | 68 | 304 |
| 828783 | 954 | 971 | 173873 | 173890 | CAGTCACATCAAAGTACC | 33 | 305 |
| 828793 | 1034 | 1051 | 173953 | 173970 | GGCCATGCAGTACTCTTC | 90 | 306 |
| 828799 | 1047 | 1064 | 173966 | 173983 | CGCTGCCACACACGGCCA | 73 | 307 |
| 828805 | 1081 | 1098 | 176598 | 176615 | TCCTGGGTAGTCTTGAGT | 124 | 308 |
| 828811 | 1098 | 1115 | 176615 | 176632 | GATCTCGGGCAAGAGGTT | 74 | 309 |
| 828817 | 1111 | 1128 | N/A | N/A | GGAAGTTTAACAGGATCT | 80 | 310 |

TABLE 6
Reduction of APP RNA by 5-8-5 gapmers with mixed wings and a mixed backbone

| | SEQ ID | SEQ ID | SEQ ID | SEQ ID | | APP | |
|---|---|---|---|---|---|---|---|
| | NO: 1 | NO: 1 | NO: 2 | NO: 2 | | RNA | SEQ |
| Compound | Start | Stop | Start | Stop | | (% | ID |
| ID | Site | Site | Site | Site | Sequence (5′ to 3′) | control) | NO |
| 699498 | 305 | 322 | 83974 | 83991 | GTTCTGGATGGTCACTGG | 83 | 311 |
| 699508 | 316 | 333 | 83985 | 84002 | CGCTTGCACCAGTTCTGG | 65 | 312 |
| 699518 | 329 | 346 | 83998 | 84015 | CTGCTTGCGGCCCCGCTT | 67 | 313 |
| 699600 | 1257 | 1274 | 197971 | 197988 | CCCATTCTCTCATGACCT | 61 | 18 |
| 699644 | 1612 | 1629 | N/A | N/A | GTCATAACCTGGGACCGG | 77 | 314 |
| 828405 | 42 | 59 | 3388 | 3405 | GGAGCAGTGCCAAACCGG | 44 | 315 |
| 828411 | 68 | 85 | 3414 | 3431 | CGCCCGAGCCGTCCAGGC | 81 | 316 |
| 828417 | 94 | 111 | 61857 | 61874 | GCATTACCATCAGTGGGT | 39 | 317 |
| 828423 | 194 | 211 | 61957 | 61974 | GGTCCCTGATGGATCTGA | 50 | 318 |
| 828428 | 219 | 236 | 61982 | 61999 | CTTCCTTGGTATCAATGC | 29 | 319 |
| 828434 | 236 | 253 | 61999 | 62016 | GCAATACTGCAGGATGCC | 48 | 320 |
| 828440 | 258 | 275 | N/A | N/A | GCAGTTCAGGGTAGACTT | 51 | 321 |
| 828446 | 279 | 296 | 83948 | 83965 | CTTCTACCACATTGGTGA | 88 | 322 |
| 828452 | 294 | 311 | 83963 | 83980 | TCACTGGTTGGTTGGCTT | 41 | 323 |
| 828462 | 337 | 354 | 84006 | 84023 | GTCTTGCACTGCTTGCGG | 84 | 324 |
| 828468 | 367 | 384 | 84036 | 84053 | CAGCGGTAGGGAATCACA | 71 | 325 |
| 828474 | 376 | 393 | N/A | N/A | CCAACTAAGCAGCGGTAG | 76 | 326 |
| 828480 | 415 | 432 | 120678 | 120695 | CACTTGTCAGGAACGAGA | 35 | 327 |
| 828486 | 439 | 456 | 120702 | 120719 | ATCCTCTCCTGGTGTAAG | 77 | 328 |
| 828492 | 462 | 479 | 120725 | 120742 | GAAGATGAGTTTCGCAAA | 80 | 329 |
| 828498 | 478 | 495 | 120741 | 120758 | GCGACGGTGTGCCAGTGA | 64 | 330 |
| 828500 | 509 | 526 | 122814 | 122831 | GTTGGTACTCTTCTCACT | 64 | 331 |
| 828506 | 528 | 545 | 122833 | 122850 | ACATGCCGTAGTCATGCA | 114 | 332 |
| 828512 | 545 | 562 | 122850 | 122867 | AATTCCGCAGGGCAGCAA | 63 | 333 |
| 828518 | 561 | 578 | 122866 | 122883 | CCCCTCGGAACTTGTCAA | 96 | 334 |
| 828524 | 570 | 587 | 122875 | 122892 | CAAACTCTACCCCTCGGA | 75 | 335 |
| 828530 | 634 | 651 | 122939 | 122956 | GAGTCATCCTCCTCCGCA | 70 | 336 |
| 828536 | 646 | 663 | 122951 | 122968 | CACCAGACATCCGAGTCA | 96 | 337 |
| 828542 | 666 | 683 | 122971 | 122988 | AGTCTGTGTCTGCTCCGC | 26 | 338 |
| 828548 | 681 | 698 | N/A | N/A | CACTCCCATCTGCATAGT | 71 | 339 |
| 828560 | N/A | N/A | 191523 | 191540 | GGCTGCTGTTGTAGGAAC | 45 | 340 |
| 828566 | 1154 | 1171 | 191553 | 191570 | GAGATACTTGTCAACGGC | 41 | 341 |
| 828572 | 1168 | 1185 | 191567 | 191584 | TCCCCAGGTGTCTCGAGA | 63 | 342 |
| 828578 | 1229 | 1246 | 191628 | 191645 | CTCTCGGTGCTTGGCCTC | 63 | 343 |
| 828583 | 1239 | 1256 | 191638 | 191655 | GGGACATTCTCTCTCGGT | 65 | 344 |
| 828585 | 1451 | 1468 | 198890 | 198907 | GGTGATGTAGTTCTCCAG | 58 | 345 |
| 828591 | 1462 | 1479 | 198901 | 198918 | GCCTGCAGAGCGGTGATG | 100 | 346 |
| 828597 | 1517 | 1534 | 218270 | 218287 | TGCGCGGACATACTTCTT | 67 | 347 |
| 828603 | 1529 | 1546 | 218282 | 218299 | GTCCTTCTGTTCTGCGCG | 128 | 348 |
| 828608 | 1557 | 1574 | 218310 | 218327 | GCTCGAAATGCTTTAGGG | 39 | 349 |
| 828614 | 1572 | 1589 | 218325 | 218342 | CCACCATGCGCACATGCT | 28 | 350 |
| 828620 | 1580 | 1597 | 218333 | 218350 | CTTGGGATCCACCATGCG | 69 | 351 |
| 828626 | 1594 | 1611 | 218347 | 218364 | ATCTGAGCGGCTTTCTTG | 74 | 352 |
| 828632 | 1603 | 1620 | 218356 | 218373 | TGGGACCGGATCTGAGCG | 77 | 353 |
| 828643 | 1640 | 1657 | 219330 | 219347 | CATGCGCTCATAAATCAC | 52 | 354 |
| 828649 | 1694 | 1711 | 219384 | 219401 | CTGAATCTCCTCGGCCAC | 90 | 355 |
| 828655 | 1775 | 1792 | 262092 | 262109 | GATCCTTGGTTCACTAAT | 85 | 356 |
| 828661 | 1804 | 1821 | 262121 | 262138 | GATGGCATGAGAGCATCG | 88 | 357 |
| 828667 | 1841 | 1858 | 262158 | 262175 | GGGAAGGAGCTCCACGGT | 91 | 358 |
| 828672 | 1853 | 1870 | 262170 | 262187 | CTCTCCATTCACGGGAAG | 73 | 359 |
| 828678 | 1891 | 1908 | 262208 | 262225 | CCAAAAGAATGCCACGGC | 10 | 360 |
| 828684 | 1967 | 1984 | 268947 | 268964 | CAGTCCTCGGTCGGCAGC | 233 | 361 |
| 828690 | 1977 | 1994 | 268957 | 268974 | GTCGAGTGGTCAGTCCTC | 74 | 362 |
| 828695 | 1986 | 2003 | N/A | N/A | CAGAACCTGGTCGAGTGG | 90 | 363 |
| 828701 | 2013 | 2030 | 276343 | 276360 | TCTCCTCCGTCTTGATAT | 242 | 364 |
| 828707 | 2047 | 2064 | 276377 | 276394 | TGTCGGAATTCTGCATCC | 84 | 365 |
| 828713 | 2061 | 2078 | 276391 | 276408 | CATATCCTGAGTCATGTC | 67 | 366 |
| 828719 | 2121 | 2138 | 282155 | 282172 | TTGCACCTTTGTTTGAAC | 76 | 367 |
| 828725 | 2136 | 2153 | 282170 | 282187 | CCATGAGTCCAATGATTG | 85 | 368 |
| 828731 | 2148 | 2165 | 282182 | 282199 | CAACACCGCCCACCATGA | 257 | 369 |
| 828737 | 2166 | 2183 | 282200 | 282217 | CGATCACTGTCGCTATGA | 86 | 370 |
| 828743 | 2283 | 2300 | 292267 | 292284 | CGTTCTGCTGCATCTTGG | 90 | 371 |
| 828749 | 2310 | 2327 | 292294 | 292311 | AGAACTTGTAGGTTGGAT | 50 | 372 |
| 828755 | 892 | 909 | N/A | N/A | GAGCACACCTCTCGAACC | 85 | 373 |
| 828761 | 906 | 923 | 173825 | 173842 | TCTCGGCTTGTTCAGAGC | 62 | 374 |
| 828767 | 917 | 934 | 173836 | 173853 | GCACGGCCCCGTCTCGGC | 75 | 375 |
| 828773 | 932 | 949 | 173851 | 173868 | GGAGATCATTGCTCGGCA | 35 | 376 |
| 828779 | 942 | 959 | 173861 | 173878 | AGTACCAGCGGGAGATCA | 84 | 377 |
| 828784 | 969 | 986 | 173888 | 173905 | GGGCACACTTCCCTTCAG | 84 | 378 |
| 828788 | 996 | 1013 | 173915 | 173932 | TGCCGCCACATCCGCCGT | 64 | 379 |
| 828794 | 1036 | 1053 | 173955 | 173972 | ACGGCCATGCAGTACTCT | 53 | 380 |
| 828800 | 1048 | 1065 | 173967 | 173984 | GCGCTGCCACACACGGCC | 67 | 381 |
| 828806 | 1084 | 1101 | 176601 | 176618 | GGTTCCTGGGTAGTCTTG | 73 | 382 |
| 828812 | 1099 | 1116 | 176616 | 176633 | GGATCTCGGGCAAGAGGT | 80 | 383 |
| 828818 | 1124 | 1141 | N/A | N/A | GGCTGCTGTTGTAGGAAG | 73 | 384 |
| 828830 | N/A | N/A | 83927 | 83944 | GCAGTTCAGGGTAGACCT | 74 | 385 |

TABLE 7
Reduction of APP RNA by 5-8-5 gapmers with mixed wings and a mixed backbone

| | SEQ ID | SEQ ID | SEQ ID | SEQ ID | | APP | |
|---|---|---|---|---|---|---|---|
| | NO: 1 | NO: 1 | NO: 2 | NO: 2 | | RNA | SEQ |
| Compound | Start | Stop | Start | Stop | | (% | ID |
| ID | Site | Site | Site | Site | Sequence (5′ to 3′) | control) | NO: |
| 699500 | 307 | 324 | 83976 | 83993 | CAGTTCTGGATGGTCACT | 59 | 386 |
| 699509 | 317 | 334 | 83986 | 84003 | CCGCTTGCACCAGTTCTG | 43 | 387 |
| 699533 | 487 | 504 | N/A | N/A | GTCTCTTTGGCGACGGTG | 32 | 388 |
| 699572 | 985 | 1002 | 173904 | 173921 | CCGCCGTAAAAGAATGGG | 85 | 389 |
| 699592 | 1244 | 1261 | N/A | N/A | GACCTGGGACATTCTCTC | 58 | 390 |
| 699600 | 1257 | 1274 | 197971 | 197988 | CCCATTCTCTCATGACCT | 47 | 18 |
| 828406 | 44 | 61 | 3390 | 3407 | CAGGAGCAGTGCCAAACC | 45 | 391 |
| 828412 | 69 | 86 | 3415 | 3432 | GCGCCCGAGCCGTCCAGG | 51 | 392 |
| 828418 | 97 | 114 | 61860 | 61877 | CCAGCATTACCATCAGTG | 31 | 393 |
| 828424 | 200 | 217 | 61963 | 61980 | GGTTTTGGTCCCTGATGG | 55 | 394 |
| 828429 | 221 | 238 | 61984 | 62001 | GCCTTCCTTGGTATCAAT | 60 | 395 |
| 828435 | 238 | 255 | 62001 | 62018 | TGGCAATACTGCAGGATG | 27 | 396 |
| 828441 | 259 | 276 | N/A | N/A | TGCAGTTCAGGGTAGACT | 52 | 397 |
| 828447 | 285 | 302 | 83954 | 83971 | GGTTGGCTTCTACCACAT | 51 | 398 |
| 828453 | 295 | 312 | 83964 | 83981 | GTCACTGGTTGGTTGGCT | 78 | 399 |
| 828458 | 330 | 347 | 83999 | 84016 | ACTGCTTGCGGCCCCGCT | 66 | 400 |
| 828463 | 339 | 356 | 84008 | 84025 | GGGTCTTGCACTGCTTGC | 41 | 401 |
| 828469 | 368 | 385 | 84037 | 84054 | GCAGCGGTAGGGAATCAC | 85 | 402 |
| 828475 | 378 | 395 | N/A | N/A | CACCAACTAAGCAGCGGT | 102 | 403 |
| 828481 | 417 | 434 | 120680 | 120697 | TGCACTTGTCAGGAACGA | 43 | 404 |
| 828487 | 441 | 458 | 120704 | 120721 | CCATCCTCTCCTGGTGTA | 54 | 405 |
| 828493 | 464 | 481 | 120727 | 120744 | GTGAAGATGAGTTTCGCA | 88 | 406 |
| 828501 | 513 | 530 | 122818 | 122835 | GCAAGTTGGTACTCTTCT | 40 | 407 |
| 828507 | 530 | 547 | 122835 | 122852 | CAACATGCCGTAGTCATG | 44 | 408 |
| 828513 | 547 | 564 | 122852 | 122869 | TCAATTCCGCAGGGCAGC | 72 | 409 |
| 828519 | 562 | 579 | 122867 | 122884 | ACCCCTCGGAACTTGTCA | 66 | 410 |
| 828525 | 571 | 588 | 122876 | 122893 | ACAAACTCTACCCCTCGG | 90 | 411 |
| 828531 | 636 | 653 | 122941 | 122958 | CCGAGTCATCCTCCTCCG | 42 | 412 |
| 828537 | 652 | 669 | 122957 | 122974 | CCGCCCCACCAGACATCC | 44 | 413 |
| 828543 | 671 | 688 | 122976 | 122993 | TGCATAGTCTGTGTCTGC | 45 | 414 |
| 828549 | 682 | 699 | N/A | N/A | TCACTCCCATCTGCATAG | 94 | 415 |
| 828561 | 1128 | 1145 | 191527 | 191544 | TACTGGCTGCTGTTGTAG | 116 | 416 |
| 828567 | 1157 | 1174 | 191556 | 191573 | CTCGAGATACTTGTCAAC | 60 | 417 |
| 828573 | 1169 | 1186 | 191568 | 191585 | ATCCCCAGGTGTCTCGAG | 78 | 418 |
| 828579 | 1231 | 1248 | 191630 | 191647 | CTCTCTCGGTGCTTGGCC | 58 | 419 |
| 828586 | 1452 | 1469 | 198891 | 198908 | CGGTGATGTAGTTCTCCA | 71 | 420 |
| 828592 | 1474 | 1491 | 198913 | 198930 | CGAGGAGGAACAGCCTGC | 69 | 421 |
| 828598 | 1518 | 1535 | 218271 | 218288 | CTGCGCGGACATACTTCT | 61 | 422 |
| 828604 | 1531 | 1548 | 218284 | 218301 | CTGTCCTTCTGTTCTGCG | 57 | 423 |
| 828609 | 1559 | 1576 | 218312 | 218329 | ATGCTCGAAATGCTTTAG | 59 | 424 |
| 828615 | 1574 | 1591 | 218327 | 218344 | ATCCACCATGCGCACATG | 53 | 425 |
| 828621 | 1582 | 1599 | 218335 | 218352 | TTCTTGGGATCCACCATG | 112 | 426 |
| 828627 | 1595 | 1612 | 218348 | 218365 | GATCTGAGCGGCTTTCTT | 127 | 427 |
| 828633 | 1604 | 1621 | 218357 | 218374 | CTGGGACCGGATCTGAGC | 68 | 428 |
| 828638 | 1624 | 1641 | 219314 | 219331 | ACACGGAGGTGTGTCATA | 54 | 429 |
| 828644 | 1642 | 1659 | 219332 | 219349 | TTCATGCGCTCATAAATC | 100 | 430 |
| 828650 | 1696 | 1713 | 219386 | 219403 | TCCTGAATCTCCTCGGCC | 59 | 431 |
| 828656 | 1778 | 1795 | 262095 | 262112 | ACTGATCCTTGGTTCACT | 61 | 432 |
| 828662 | 1812 | 1829 | 262129 | 262146 | CGGTCAAAGATGGCATGA | 79 | 433 |
| 828668 | 1842 | 1859 | 262159 | 262176 | CGGGAAGGAGCTCCACGG | 100 | 434 |
| 828673 | 1856 | 1873 | 262173 | 262190 | GAACTCTCCATTCACGGG | 113 | 435 |
| 828679 | 1939 | 1956 | N/A | N/A | TCAACAGGCTCAACTTCG | 178 | 436 |
| 828685 | 1969 | 1986 | 268949 | 268966 | GTCAGTCCTCGGTCGGCA | 138 | 437 |
| 828691 | 1978 | 1995 | 268958 | 268975 | GGTCGAGTGGTCAGTCCT | 158 | 438 |
| 828696 | 1987 | 2004 | N/A | N/A | CCAGAACCTGGTCGAGTG | 124 | 439 |
| 828702 | 2014 | 2031 | 276344 | 276361 | ATCTCCTCCGTCTTGATA | 322 | 440 |
| 828708 | 2051 | 2068 | 276381 | 276398 | GTCATGTCGGAATTCTGC | 49 | 441 |
| 828714 | 2067 | 2084 | 276397 | 276414 | GAACTTCATATCCTGAGT | 99 | 442 |
| 828720 | 2123 | 2140 | 282157 | 282174 | GATTGCACCTTTGTTTGA | 306 | 443 |
| 828726 | 2138 | 2155 | 282172 | 282189 | CACCATGAGTCCAATGAT | 114 | 444 |
| 828732 | 2151 | 2168 | 282185 | 282202 | TGACAACACCGCCCACCA | 102 | 445 |
| 828738 | 2170 | 2187 | 282204 | 282221 | ATGACGATCACTGTCGCT | 96 | 446 |
| 828744 | 2285 | 2302 | 292269 | 292286 | GCCGTTCTGCTGCATCTT | 152 | 447 |
| 828750 | 883 | 900 | N/A | N/A | TCTCGAACCACCTCTTCC | 100 | 448 |
| 828756 | 895 | 912 | N/A | N/A | TCAGAGCACACCTCTCGA | 109 | 449 |
| 828762 | 909 | 926 | 173828 | 173845 | CCGTCTCGGCTTGTTCAG | 64 | 450 |
| 828768 | 918 | 935 | 173837 | 173854 | GGCACGGCCCCGTCTCGG | 70 | 451 |
| 828774 | 933 | 950 | 173852 | 173869 | GGGAGATCATTGCTCGGC | 56 | 452 |
| 828780 | 945 | 962 | 173864 | 173881 | CAAAGTACCAGCGGGAGA | 79 | 453 |
| 828789 | 999 | 1016 | 173918 | 173935 | GGTTGCCGCCACATCCGC | 98 | 454 |
| 828795 | 1037 | 1054 | 173956 | 173973 | CACGGCCATGCAGTACTC | 58 | 455 |
| 828801 | 1062 | 1079 | N/A | N/A | AACTTTGGGACATGGCGC | 89 | 456 |
| 828807 | 1086 | 1103 | 176603 | 176620 | GAGGTTCCTGGGTAGTCT | 86 | 457 |
| 828813 | 1101 | 1118 | 176618 | 176635 | CAGGATCTCGGGCAAGAG | 68 | 458 |
| 828819 | N/A | N/A | 33809 | 33826 | AAGTCCTCTAATTGGTCC | 82 | 459 |

TABLE 8
Reduction of APP RNA by 5-8-5 gapmers with mixed wings and a mixed backbone

| | SEQ ID | SEQ ID | SEQ ID | SEQ ID | | APP | |
|---|---|---|---|---|---|---|---|
| | NO: 3 | NO: 3 | NO: 4 | NO: 4 | | RNA | SEQ |
| Compound | Start | Stop | Start | Stop | | (% | ID |
| ID | Site | Site | Site | Site | Sequence (5′ to 3′) | control) | NO |
| 828554 | N/A | N/A | 999 | 1016 | GGAACTCGAACCACCTCT | 121 | 460 |
| 828555 | N/A | N/A | 1001 | 1018 | TAGGAACTCGAACCACCT | 87 | 461 |
| 828556 | N/A | N/A | 1002 | 1019 | GTAGGAACTCGAACCACC | 56 | 462 |
| 828557 | N/A | N/A | 1005 | 1022 | GTTGTAGGAACTCGAACC | 88 | 463 |
| 828558 | N/A | N/A | 1008 | 1025 | GCTGTTGTAGGAACTCGA | 79 | 464 |
| 828559 | N/A | N/A | 1010 | 1027 | CTGCTGTTGTAGGAACTC | 43 | 465 |
| 828824 | 1195 | 1212 | N/A | N/A | CTGTTGTAGGAATGGCGC | 145 | 468 |
| 828825 | 1200 | 1217 | N/A | N/A | GGCTGCTGTTGTAGGAAT | 57 | 469 |

TABLE 9
Reduction of APP RNA by 5-8-5 gapmers with mixed wings and a mixed backbone

| | SEQ ID | SEQ ID | SEQ ID | SEQ ID | SEQ ID | SEQ ID | | APP | |
|---|---|---|---|---|---|---|---|---|---|
| | NO: 5 | NO: 5 | NO: 6 | NO: 6 | NO: 7 | NO: 7 | | RNA | SEQ |
| Compound | Start | Stop | Start | Stop | Start | Stop | | (% | ID |
| ID | Site | Site | Site | Site | Site | Site | Sequence (5′ to 3′) | control) | NO |
| 828822 | 241 | 258 | N/A | N/A | N/A | N/A | CAGTGGGTACATAGTTGA | 122 | 466 |
| 828823 | 243 | 260 | N/A | N/A | N/A | N/A | CCATCAGTGGGTACATAG | 57 | 467 |
| 828826 | N/A | N/A | 176 | 193 | N/A | N/A | AGGGTAGACCTCCAGCGC | 57 | 470 |
| 828827 | N/A | N/A | 178 | 195 | N/A | N/A | TCAGGGTAGACCTCCAGC | 80 | 471 |
| 828828 | N/A | N/A | 180 | 197 | N/A | N/A | GTTCAGGGTAGACCTCCA | 84 | 472 |
| 828829 | N/A | N/A | 182 | 199 | N/A | N/A | CAGTTCAGGGTAGACCTC | 67 | 473 |
| 828831 | N/A | N/A | N/A | N/A | 1952 | 1969 | GTCAACCCAGAACCTTCG | 121 | 474 |

### Example 2: Effect of Modified Oligonucleotides on Human APP In Vitro, Multiple Doses

[0841] Modified oligonucleotides selected from the examples above were tested at various doses in SH-S5Y cells. Cells were plated at a density of 20,000 cells per well and treated by electroporation with various modified oligonucleotides, as specified in the tables below. After a treatment period of approximately 24 hours, total RNA was isolated from the cells and APP RNA levels were measured by quantitative real-time PCR. Human APP primer probe set HTS96, described herein above, was used to measure RNA levels. APP RNA levels were normalized to GADPH. Results are presented in the tables below as percent APP RNA levels relative to untreated control cells. The half maximal inhibitory concentration (IC₅₀) of each modified oligonucleotide is also presented. IC₅₀ was calculated using a linear regression on a log/linear plot of the data in excel. ‘N.D.’ (‘no data’) indicates that the % inhibition was not determined for that particular modified oligonucleotide in that particular experiment. ‘N.C.’ (“no calculation”) indicates that the range of concentrations tested was not sufficient for an accurate calculation of IC₅₀.

TABLE 10
Dose-dependent reduction of human APP RNA expression
in SH-S5Y cells

| | APP RNA Expression (% control) | | | | |
|---|---|---|---|---|---|
| Compound ID | 0.31 nM | 1.25 nM | 5.0 nM | 20.0 nM | IC50(μM) |
| 828425 | 87 | 55 | 36 | 18 | 2.3 |
| 828426 | 84 | 87 | 54 | 27 | 6.6 |
| 828443 | 126 | 107 | 144 | 62 | N.C. |
| 828444 | 108 | 83 | 51 | 26 | 5.8 |
| 828455 | 83 | 96 | 58 | 25 | 7.3 |
| 828464 | 71 | 43 | 18 | 7 | 0.9 |
| 828490 | 61 | 38 | 34 | 19 | 0.7 |
| 828527 | 85 | 52 | 21 | 30 | 1.4 |
| 828528 | 97 | 63 | 37 | 20 | 3.2 |
| 828532 | 74 | 49 | 44 | 11 | 1.4 |
| 828533 | 64 | 49 | 40 | 10 | 1.2 |
| 828545 | 78 | 52 | 27 | 14 | 1.5 |
| 828546 | 110 | 62 | 72 | 52 | N.C. |
| 828550 | 103 | 75 | 82 | 59 | N.C. |
| 828574 | 59 | 38 | 22 | 21 | 0.6 |
| 828606 | 151 | 107 | 76 | 63 | N.C. |
| 828610 | 129 | 81 | 58 | 34 | 7.8 |
| 828645 | 69 | 58 | 25 | 20 | 1.5 |

TABLE 11
Dose-dependent reduction of human APP RNA expression
in SH-S5Y cells

| | APP RNA Expression (% control) | | | | |
|---|---|---|---|---|---|
| | 0.31 nM | 1.25 nM | 5.0 nM | 20.0 nM | IC50(μM) |
| 699533 | 63 | 33 | 25 | 13 | 0.6 |
| 828404 | 78 | 56 | 30 | N.D. | 1.7 |
| 828417 | 92 | 57 | 48 | 19 | 3.2 |
| 828418 | 63 | 40 | 27 | 10 | 0.7 |
| 828422 | 68 | 36 | 23 | 8 | 0.8 |
| 828428 | 44 | 29 | 40 | 13 | 0.1 |
| 828435 | 83 | 55 | 34 | 34 | 1.9 |
| 828445 | 113 | 52 | 37 | 6 | 2.7 |
| 828463 | 103 | 103 | 13 | N.D. | 2.6 |
| 828480 | 83 | 56 | 30 | 11 | 1.9 |
| 828499 | 86 | 66 | 32 | 11 | 2.3 |
| 828501 | 134 | 47 | 38 | 9 | 3.2 |
| 828531 | 77 | 76 | 39 | 54 | 3.6 |
| 828541 | 70 | 69 | 40 | 31 | 3.1 |
| 828542 | 60 | 51 | 31 | 7 | 0.9 |
| 828565 | 46 | 27 | 14 | 5 | 0.2 |
| 828614 | 63 | 40 | 26 | 9 | 0.7 |
| 828645 | 94 | 73 | 35 | 27 | 3.8 |
| 828773 | 61 | 39 | 43 | 17 | 0.8 |

### Example 3: Effect of Mixed Wing and Mixed Backbone or MOE and Mixed Backbone Modified Oligonucleotides on Human APP RNA In Vitro, Single Dose

[0842] Modified oligonucleotides complementary to human APP were synthesized with chemical modification patterns as indicated in the table below. The modified oligonucleotides in the table below are gapmers. The gapmers have a central gap segment that comprises 2′-deoxynucleosides and is flanked by wing segments on both the 5′ end on the 3′ end comprising and cEt nucleosides and/or 2′-MOE nucleosides. All cytosine residues throughout each gapmer are 5′-methyl cytosines. The internucleoside linkages are mixed phosphodiester internucleoside linkages and phosphorothioate internucleoside linkages.

[0843] Cultured SH-SY5Y cells at a density of 20,000 cells per well were treated with 4,000 nM of modified oligonucleotide by electroporation. After a treatment period of approximately 24 hours, total RNA was isolated from the cells and APP RNA levels were measured by quantitative real-time RTPCR. Human APP primer probe set RTS35571 (forward sequence CCCACTTTGTGATTCCCTACC, designated herein as SEQ ID NO: 913; reverse sequence ATCCATCCTCTCCTGGTGTAA, designated herein as SEQ ID NO: 914; probe sequence TGATGCCCTTCTCGTTCCTGACAA, designated herein as SEQ ID NO: 915) was used to measure RNA levels. APP RNA levels were adjusted according to total RNA content, as measured by RIBOGREEN®. Results are presented in the tables below as percent APP RNA levels relative to untreated control cells.

[0844] Modified oligonucleotides in Table 12 below are 18 nucleosides in length and have the sugar motif eeeeeddddddddkeeee, wherein each “e” is nucleoside comprising a 2′-MOE sugar moiety, each “k” is a nucleoside comprising a cEt sugar moiety, and each “d” is a nucleoside comprising a 2′-β-D-deoxyribosyl sugar moiety. The internucleoside linkage motif is sososssssssssosss, wherein each “s” represents a phosphorothioate internucleoside linkage and each “o” represents a phosphodiester internucleoside linkage. All cytosine residues are 5-methylcytosines. “Start Site” indicates the 5′-most nucleoside to which the gapmer is complementary in the human nucleic acid sequence. “Stop Site” indicates the 3′-most nucleoside to which the gapmer is complementary in the human nucleic acid sequence.

TABLE 12
Reduction of APP with 5-8-5 gapmers with mixed wings and a mixed backbone

| | SEQ ID | SEQ ID | SEQ ID | SEQ ID | | APP | |
|---|---|---|---|---|---|---|---|
| | NO: 1 | NO: 1 | NO: 2 | NO: 2 | | RNA | SEQ |
| Compound | Start | Stop | Start | Stop | | (% | ID |
| ID | Site | Site | Site | Site | Sequence (5′ to 3′) | control) | NO: |
| 912249 | 487 | 504 | N/A | N/A | GTCTCTTTGGCGACGGTG | 99 | 388 |
| 912250 | 488 | 505 | N/A | N/A | TGTCTCTTTGGCGACGGT | 36 | 475 |
| 912251 | 489 | 506 | N/A | N/A | ATGTCTCTTTGGCGACGG | 29 | 16 |
| 912252 | 490 | 507 | N/A | N/A | CATGTCTCTTTGGCGACG | 36 | 476 |
| 912253 | 491 | 508 | N/A | N/A | GCATGTCTCTTTGGCGAC | 33 | 90 |
| 912254 | 492 | 509 | N/A | N/A | TGCATGTCTCTTTGGCGA | 27 | 477 |
| 912255 | 493 | 510 | N/A | N/A | CTGCATGTCTCTTTGGCG | 19 | 165 |
| 912256 | 657 | 674 | 122962 | 122979 | CTGCTCCGCCCCACCAGA | 52 | 116 |
| 912257 | 659 | 676 | 122964 | 122981 | GTCTGCTCCGCCCCACCA | 64 | 478 |
| 912258 | 661 | 678 | 122966 | 122983 | GTGTCTGCTCCGCCCCAC | 32 | 479 |
| 912259 | 662 | 679 | 122967 | 122984 | TGTGTCTGCTCCGCCCCA | 30 | 191 |
| 912260 | 663 | 680 | 122968 | 122985 | CTGTGTCTGCTCCGCCCC | 46 | 480 |
| 912261 | 664 | 681 | 122969 | 122986 | TCTGTGTCTGCTCCGCCC | 99 | 265 |
| 912262 | 665 | 682 | 122970 | 122987 | GTCTGTGTCTGCTCCGCC | 17 | 481 |
| 912263 | 666 | 683 | 122971 | 122988 | AGTCTGTGTCTGCTCCGC | 15 | 338 |
| 912264 | 667 | 684 | 122972 | 122989 | TAGTCTGTGTCTGCTCCG | 43 | 482 |
| 912265 | 668 | 685 | 122973 | 122990 | ATAGTCTGTGTCTGCTCC | 43 | 483 |
| 912266 | 669 | 686 | 122974 | 122991 | CATAGTCTGTGTCTGCTC | 28 | 484 |
| 912267 | 670 | 687 | 122975 | 122992 | GCATAGTCTGTGTCTGCT | 24 | 485 |
| 912268 | 671 | 688 | 122976 | 122993 | TGCATAGTCTGTGTCTGC | 33 | 414 |
| 912269 | 672 | 689 | 122977 | 122994 | CTGCATAGTCTGTGTCTG | 41 | 486 |
| 912270 | 674 | 691 | 122979 | 122996 | ATCTGCATAGTCTGTGTC | 60 | 43 |
| 912271 | 676 | 693 | 122981 | 122998 | CCATCTGCATAGTCTGTG | 24 | 117 |
| 912272 | 678 | 695 | 122983 | 123000 | TCCCATCTGCATAGTCTG | 17 | 487 |
| 912273 | 1614 | 1631 | N/A | N/A | GTGTCATAACCTGGGACC | 36 | 488 |
| 912274 | 1616 | 1633 | N/A | N/A | GTGTGTCATAACCTGGGA | 41 | 489 |
| 912275 | 1618 | 1635 | N/A | N/A | AGGTGTGTCATAACCTGG | 61 | 490 |
| 912276 | 1620 | 1637 | 219310 | 219327 | GGAGGTGTGTCATAACCT | 52 | 491 |
| 912277 | 1622 | 1639 | 219312 | 219329 | ACGGAGGTGTGTCATAAC | 56 | 492 |
| 912278 | 1624 | 1641 | 219314 | 219331 | ACACGGAGGTGTGTCATA | 52 | 429 |
| 912279 | 1626 | 1643 | 219316 | 219333 | TCACACGGAGGTGTGTCA | 69 | 493 |
| 912280 | 1628 | 1645 | 219318 | 219335 | AATCACACGGAGGTGTGT | 51 | 494 |
| 912281 | 1630 | 1647 | 219320 | 219337 | TAAATCACACGGAGGTGT | 45 | 495 |
| 912282 | 1631 | 1648 | 219321 | 219338 | ATAAATCACACGGAGGTG | 68 | 496 |
| 912283 | 1632 | 1649 | 219322 | 219339 | CATAAATCACACGGAGGT | 352 | 132 |
| 912284 | 1633 | 1650 | 219323 | 219340 | TCATAAATCACACGGAGG | 362 | 497 |
| 912285 | 1634 | 1651 | 219324 | 219341 | CTCATAAATCACACGGAG | 32 | 498 |
| 912286 | 1635 | 1652 | 219325 | 219342 | GCTCATAAATCACACGGA | 26 | 207 |
| 912287 | 1636 | 1653 | 219326 | 219343 | CGCTCATAAATCACACGG | 85 | 499 |
| 912288 | 1637 | 1654 | 219327 | 219344 | GCGCTCATAAATCACACG | 150 | 281 |
| 912289 | 1638 | 1655 | 219328 | 219345 | TGCGCTCATAAATCACAC | 63 | 500 |
| 912290 | 1639 | 1656 | 219329 | 219346 | ATGCGCTCATAAATCACA | 56 | 501 |
| 912291 | 1640 | 1657 | 219330 | 219347 | CATGCGCTCATAAATCAC | 61 | 354 |

[0845] Modified oligonucleotides in Table 13 below are 20 nucleosides in length and are 5-10-5 MOE gapmers. The internucleoside linkage motif is sososssssssssssosss, wherein each “s” represents a phosphorothioate internucleoside linkage and each “o” represents a phosphodiester internucleoside linkage. All cytosine residues are 5-methylcytosines. “Start Site” indicates the 5′-most nucleoside to which the gapmer is complementary in the human nucleic acid sequence. “Stop Site” indicates the 3′-most nucleoside to which the gapmer is complementary in the human nucleic acid sequence.

TABLE 13
Reduction of APP RNA by 5-10-5 MOE gapmers having a mixed backbone

| | SEQ ID | SEQ ID | SEQ ID | SEQ ID | | APP | |
|---|---|---|---|---|---|---|---|
| | NO: 1 | NO: 1 | NO: 2 | NO: 2 | | RNA | SEQ |
| Compound | Start | Stop | Start | Stop | | (% | ID |
| ID | Site | Site | Site | Site | Sequence (5′ to 3′) | control) | NO: |
| 912292 | 486 | 505 | N/A | N/A | TGTCTCTTTGGCGACGGTGT | 37 | 502 |
| 912293 | 490 | 509 | N/A | N/A | TGCATGTCTCTTTGGCGACG | 25 | 503 |
| 912294 | 492 | 511 | N/A | N/A | ACTGCATGTCTCTTTGGCGA | 23 | 504 |
| 912295 | 663 | 682 | 122968 | 122985 | GTCTGTGTCTGCTCCGCCCC | 15 | 505 |
| 912296 | 665 | 684 | 122970 | 122987 | TAGTCTGTGTCTGCTCCGCC | 32 | 506 |
| 912297 | 670 | 689 | 122975 | 122992 | CTGCATAGTCTGTGTCTGCT | 40 | 507 |
| 912298 | 1634 | 1653 | 219324 | 219341 | CGCTCATAAATCACACGGAG | 18 | 508 |
| 912299 | 1635 | 1654 | 219325 | 219342 | GCGCTCATAAATCACACGGA | 30 | 509 |
| 912300 | 1636 | 1655 | 219326 | 219343 | TGCGCTCATAAATCACACGG | 67 | 510 |
| 912301 | 1633 | 1652 | 219323 | 219340 | GCTCATAAATCACACGGAGG | 23 | 511 |
| 912302 | 1632 | 1651 | 219322 | 219339 | CTCATAAATCACACGGAGGT | 72 | 512 |
| 912303 | 669 | 688 | 122974 | 122991 | TGCATAGTCTGTGTCTGCTC | 27 | 513 |
| 912304 | 668 | 687 | 122973 | 122990 | GCATAGTCTGTGTCTGCTCC | 28 | 514 |
| 912305 | 671 | 690 | 122976 | 122993 | TCTGCATAGTCTGTGTCTGC | 42 | 515 |
| 912306 | 672 | 691 | 122977 | 122994 | ATCTGCATAGTCTGTGTCTG | 48 | 516 |

### Example 4: Design of RNAi Compounds with Antisense RNAi Oligonucleotides Complementary to a Human APP Nucleic Acid

[0846] RNAi compounds comprising antisense RNAi oligonucleotides complementary to a human APP nucleic acid and sense RNAi oligonucleotides complementary to the antisense RNAi oligonucleotides were designed as follows.

[0847] The RNAi compounds in the tables below consist of an antisense RNAi oligonucleotide and a sense RNAi oligonucleotide, wherein, in each case the antisense RNAi oligonucleotides is 23 nucleosides in length; has a sugar motif (from 5′ to 3′) of: mfmfmfmfmfmfmfmfmfmfmmm; wherein “m” represents a 2′-O methylribosyl sugar, and the “f” represents a 2′-fluororibosyl sugar; and a linkage motif (from 5′ to 3′) of: ssooooooooooooooooooss; wherein ‘o’ represents a phosphodiester internucleoside linkage and ‘s’ represents a phosphorothioate internucleoside linkage. The sense RNAi oligonucleotides in each case is 21 nucleosides in length; has a sugar motif (from 5′ to 3′) of: fmfmfmfmfmfmfmfmfmfmf; wherein “m” represents a 2′-O methylribosyl sugar, and the “f” represents a 2′-fluororibosyl sugar; and a linkage motif (from 5′ to 3′) of: ssooooooooooooooooss; wherein ‘o’ represents a phosphodiester internucleoside linkage and ‘s’ represents a phosphorothioate internucleoside linkage. Each antisense RNAi oligonucleotides is complementary to the target nucleic acid (APP), and each sense RNAi oligonucleotides is complementary to the first of the 21 nucleosides of the antisense RNAi oligonucleotide (from 5′ to 3′) wherein the last two 3′-nucleosides of the antisense RNAi oligonucleotides are not paired with the sense RNAi oligonucleotide (are overhanging nucleosides).

[0848] “Start site” indicates the 5′-most nucleoside to which the antisense RNAi oligonucleotides is complementary in the human gene sequence. “Stop site” indicates the 3′-most nucleoside to which the antisense RNAi oligonucleotide is complementary in the human gene sequence. Each modified antisense RNAi oligonucleoside listed in the Tables below is 100% complementary to either SEQ ID NO: 1 (described herein above), SEQ ID NO: 2 (described herein above) or SEQ ID No:3 (described herein above) as indicated in the tables below.

TABLE 14
RNAi compounds targeting human APP SEQ ID No: 1

| | | | | SEQ ID | SEQ ID | | | |
|---|---|---|---|---|---|---|---|---|
| | | Antisense | SEQ | NO: 1 | NO: 1 | | | |
| Compound | Antisense | Sequence | ID | Antisense | Antisense | Sense | Sense Sequence | SEQ |
| Number | oligo ID | (5′ to 3′) | NO | Start Site | Stop Site | oligo ID | (5′ to 3′) | ID NO |
| 1381709 | 1381714 | AGCAGUGCCAAAC | 517 | 35 | 57 | 1381715 | GCUGCCCGGUUU | 666 |
| | | CGGGCAGCAU | | | | | GGCACUGCU | |
| 1381710 | 1381713 | AUCGCGACCCUGC | 518 | 14 | 36 | 1381711 | UGCCCCGCGCAG | 667 |
| | | GCGGGGCACC | | | | | GGUCGCGAU | |
| 1381712 | 1381717 | GCCGUCCAGGCGG | 519 | 56 | 78 | 1381716 | CCUGCUGGCCGC | 668 |
| | | CCAGCAGGAG | | | | | CUGGACGGC | |
| 1381718 | 1381720 | UUGUCAACGGCAU | 520 | 1142 | 1164 | 1381719 | UACCCCUGAUGC | 669 |
| | | CAGGGGUACU | | | | | CGUUGACAA | |
| 1381721 | 1381722 | AAAUGGGCAUGUU | 521 | 1184 | 1206 | 1381724 | UGAGAAUGAACA | 670 |
| | | CAUUCUCAUC | | | | | UGCCCAUUU | |
| 1381723 | 1381726 | UCCCCAGGUGUCU | 522 | 1163 | 1185 | 1381728 | GUAUCUCGAGAC | 671 |
| | | CGAGAUACUU | | | | | ACCUGGGGA | |
| 1381725 | 1381730 | AGCCUCUCUUUGG | 523 | 1205 | 1227 | 1381729 | CCAGAAAGCCAA | 672 |
| | | CUUUCUGGAA | | | | | AGAGAGGCU | |
| 1381727 | 1381732 | CUCUCUCGGUGCU | 524 | 1226 | 1248 | 1381731 | UGAGGCCAAGCA | 673 |
| | | UGGCCUCAAG | | | | | CCGAGAGAG | |
| 1381733 | 1381742 | AGCAGGCCAGCAU | 525 | 98 | 120 | 1381739 | UGAUGGUAAUGC | 674 |
| | | UACCAUCAGU | | | | | UGGCCUGCU | |
| 1381734 | 1381737 | GUGGGUACCUCCA | 526 | 77 | 99 | 1381738 | UCGGGCGCUGGA | 675 |
| | | GCGCCCGAGC | | | | | GGUACCCAC | |
| 1381735 | 1381743 | CCAUUCUGGACAU | 527 | 161 | 183 | 1381741 | GCACAUGAAUGU | 676 |
| | | UCAUGUGCAU | | | | | CCAGAAUGG | |
| 1381736 | 1381745 | AUGUUCAGUCUGC | 528 | 140 | 162 | 1381744 | GUUCUGUGGCAG | 677 |
| | | CACAGAACAU | | | | | ACUGAACAU | |
| 1381740 | 1381748 | AUGGCAAUCUGGG | 529 | 119 | 141 | 1381750 | GGCUGAACCCCA | 678 |
| | | GUUCAGCCAG | | | | | GAUUGCCAU | |
| 1381746 | 1381749 | UCUCUCAUGACCU | 530 | 1247 | 1269 | 1381747 | AAUGUCCCAGGU | 679 |
| | | GGGACAUUCU | | | | | CAUGAGAGA | |
| 1381751 | 1381754 | UGACGUUCUGCCU | 531 | 1268 | 1290 | 1381753 | AUGGGAAGAGGC | 680 |
| | | CUUCCCAUUC | | | | | AGAACGUCA | |
| 1381752 | 1381762 | GCUUUAGGCAAGU | 532 | 1289 | 1311 | 1381764 | AGCAAAGAACUU | 681 |
| | | UCUUUGCUUG | | | | | GCCUAAAGC | |
| 1381755 | 1381758 | GAUGGAUCUGAAU | 533 | 182 | 204 | 1381757 | GAAGUGGGAUUC | 682 |
| | | CCCACUUCCC | | | | | AGAUCCAUC | |
| 1381756 | 1381760 | UGGAUAACUGCCU | 534 | 1310 | 1332 | 1381763 | UGAUAAGAAGGC | 683 |
| | | UCUUAUCAGC | | | | | AGUUAUCCA | |
| 1381759 | 1381767 | UCCACUUUCUCCU | 535 | 1331 | 1353 | 1381768 | GCAUUUCCAGGA | 684 |
| | | GGAAAUGCUG | | | | | GAAAGUGGA | |
| 1381761 | 1381765 | GCUGCUUCCUGUU | 536 | 1352 | 1374 | 1381766 | AUCUUUGGAACA | 685 |
| | | CCAAAGAUUC | | | | | GGAAGCAGC | |
| 1381771 | 1381769 | UCAAUGCAGGUUU | 537 | 203 | 225 | 1381770 | AGGGACCAAAAC | 686 |
| | | UGGUCCCUGA | | | | | CUGCAUUGA | |
| 1381772 | 1381777 | GGGUAGACUUCUU | 538 | 245 | 267 | 1381775 | GUAUUGCCAAGA | 687 |
| | | GGCAAUACUG | | | | | AGUCUACCC | |
| 1381773 | 1381780 | UGCAGGAUGCCUU | 539 | 224 | 246 | 1381774 | UACCAAGGAAGG | 688 |
| | | CCUUGGUAUC | | | | | CAUCCUGCA | |
| 1381776 | 1381785 | ACAUUGGUGAUCU | 540 | 266 | 288 | 1381783 | UGAACUGCAGAU | 689 |
| | | GCAGUUCAGG | | | | | CACCAAUGU | |
| 1381778 | 1381779 | ACUGGUUGGUUGG | 541 | 287 | 309 | 1381781 | GGUAGAAGCCAA | 690 |
| | | CUUCUACCAC | | | | | CCAACCAGU | |
| 1381782 | 1381786 | ACCAGCUGCUGUC | 542 | 1373 | 1395 | 1381784 | CAACGAGAGACA | 691 |
| | | UCUCGUUGGC | | | | | GCAGCUGGU | |
| 1381789 | 1381787 | UUGCACCAGUUCU | 543 | 308 | 330 | 1381788 | GACCAUCCAGAA | 692 |
| | | GGAUGGUCAC | | | | | CUGGUGCAA | |
| 1381790 | 1381799 | UUGCACUGCUUGC | 544 | 329 | 351 | 1381800 | GCGGGGCCGCAA | 693 |
| | | GGCCCCGCUU | | | | | GCAGUGCAA | |
| 1381791 | 1381793 | CGGUCAUUGAGCA | 545 | 1415 | 1437 | 1381794 | GGAAGCCAUGCU | 694 |
| | | UGGCUUCCAC | | | | | CAAUGACCG | |
| 1381792 | 1381797 | ACUCUGGCCAUGU | 546 | 1394 | 1416 | 1381796 | GGAGACACACAU | 695 |
| | | GUGUCUCCAC | | | | | GGCCAGAGU | |
| 1381795 | 1381804 | UUCUCCAGGGCCA | 547 | 1436 | 1458 | 1381803 | CCGCCGCCUGGC | 696 |
| | | GGCGGCGGCG | | | | | CCUGGAGAA | |
| 1381798 | 1381801 | AUCACAAAGUGGG | 548 | 350 | 372 | 1381806 | GACCCAUCCCCA | 697 |
| | | GAUGGGUCUU | | | | | CUUUGUGAU | |
| 1381802 | 1381807 | GCCUGCAGAGCGG | 549 | 1457 | 1479 | 1381805 | CUACAUCACCGC | 698 |
| | | UGAUGUAGUU | | | | | UCUGCAGGC | |
| 1381808 | 1381815 | UGACGAGGCCGAG | 550 | 1478 | 1500 | 1381819 | UGUUCCUCCUCG | 699 |
| | | GAGGAACAGC | | | | | GCCUCGUCA | |
| 1381809 | 1381812 | AGGGCAUCACUUA | 551 | 392 | 414 | 1381811 | UGAGUUUGUAA | 700 |
| | | CAAACUCACC | | | | | GUGAUGCCCU | |
| 1381810 | 1381816 | CCAACUAAGCAGC | 552 | 371 | 393 | 1381813 | UCCCUACCGCUG | 701 |
| | | GGUAGGGAAU | | | | | CUUAGUUGG | |
| 1381817 | 1381820 | AUCCUCUCCUGGU | 553 | 434 | 456 | 1381814 | AUUCUUACACCA | 702 |
| | | GUAAGAAUUU | | | | | GGAGAGGAU | |
| 1381818 | 1381823 | UUGCACUUGUCAG | 554 | 413 | 435 | 1381821 | UCUCGUUCCUGA | 703 |
| | | GAACGAGAAG | | | | | CAAGUGCAA | |
| 1381825 | 1381824 | AGAUGAGUUUCGC | 555 | 455 | 477 | 1381822 | GGAUGUUUGCGA | 704 |
| | | AAACAUCCAU | | | | | AACUCAUCU | |
| 1381826 | 1381829 | UUCUUUAGCAUAU | 556 | 1499 | 1521 | 1381827 | CGUGUUCAAUAU | 705 |
| | | UGAACACGUG | | | | | GCUAAAGAA | |
| 1381828 | 1381833 | UUCUGUUCUGCGC | 557 | 1520 | 1542 | 1381834 | GUAUGUCCGCGC | 706 |
| | | GGACAUACUU | | | | | AGAACAGAA | |
| 1381830 | 1381836 | UUGGCGACGGUGU | 558 | 476 | 498 | 1381831 | UCACUGGCACAC | 707 |
| | | GCCAGUGAAG | | | | | CGUCGCCAA | |
| 1381832 | 1381837 | CUCUUCUCACUGC | 559 | 497 | 519 | 1381838 | AGAGACAUGCAG | 708 |
| | | AUGUCUCUUU | | | | | UGAGAAGAG | |
| 1381835 | 1381843 | UUUAGGGUGUGCU | 560 | 1541 | 1563 | 1381839 | GGACAGACAGCA | 709 |
| | | GUCUGUCCUU | | | | | CACCCUAAA | |
| 1381840 | 1381841 | AUGCGCACAUGCU | 561 | 1562 | 1584 | 1381845 | GCAUUUCGAGCA | 710 |
| | | CGAAAUGCUU | | | | | UGUGCGCAU | |
| 1381842 | 1381846 | GCGGCUUUCUUGG | 562 | 1583 | 1605 | 1381847 | GGUGGAUCCCAA | 711 |
| | | GAUCCACCAU | | | | | GAAAGCCGC | |
| 1381844 | 1381849 | AUAACCUGGGACC | 563 | 1604 | 1626 | 1381848 | UCAGAUCCGGUC | 712 |
| | | GGAUCUGAGC | | | | | CCAGGUUAU | |
| 1381850 | 1381852 | UAAAUCACACGGA | 564 | 1625 | 1647 | 1381851 | GACACACCUCCG | 713 |
| | | GGUGUGUCAU | | | | | UGUGAUUUA | |
| 1381853 | 1381856 | AGAGACUGAUUCA | 565 | 1646 | 1668 | 1381857 | UGAGCGCAUGAA | 714 |
| | | UGCGCUCAUA | | | | | UCAGUCUCU | |
| 1381854 | 1381859 | GGCACGUUGUAGA | 566 | 1667 | 1689 | 1381860 | CUCCCUGCUCUA | 715 |
| | | GCAGGGAGAG | | | | | CAACGUGCC | |
| 1381855 | 1381866 | UGAAUCUCCUCGG | 567 | 1688 | 1710 | 1381867 | UGCAGUGGCCGA | 716 |
| | | CCACUGCAGG | | | | | GGAGAUUCA | |
| 1381858 | 1381865 | AGCAGCUCAUCAA | 568 | 1709 | 1731 | 1381862 | GGAUGAAGUUG | 717 |
| | | CUUCAUCCUG | | | | | AUGAGCUGCU | |
| 1381861 | 1381869 | GAAUAGUUUUGCU | 569 | 1730 | 1752 | 1381863 | UCAGAAAGAGCA | 718 |
| | | CUUUCUGAAG | | | | | AAACUAUUC | |
| 1381864 | 1381870 | AUGUUGGCCAAGA | 570 | 1751 | 1773 | 1381868 | AGAUGACGUCUU | 719 |
| | | CGUCAUCUGA | | | | | GGCCAACAU | |
| 1381872 | 1381871 | CUGAUCCUUGGUU | 571 | 1772 | 1794 | 1381873 | GAUUAGUGAACC | 720 |
| | | CACUAAUCAU | | | | | AAGGAUCAG | |
| 1381874 | 1381878 | AUGAGAGCAUCGU | 572 | 1793 | 1815 | 1381877 | UUACGGAAACGA | 721 |
| | | UUCCGUAACU | | | | | UGCUCUCAU | |
| 1381875 | 1381881 | GGAAGGAGCUCCA | 573 | 1835 | 1857 | 1381880 | AACCACCGUGGA | 722 |
| | | CGGUGGUUUU | | | | | GCUCCUUCC | |
| 1381876 | 1381883 | UUCGUUUCGGUCA | 574 | 1814 | 1836 | 1381885 | GCCAUCUUUGAC | 723 |
| | | AAGAUGGCAU | | | | | CGAAACGAA | |
| 1381879 | 1381884 | UGCCACGGCUGGA | 575 | 1877 | 1899 | 1381886 | GGACGAUCUCCA | 724 |
| | | GAUCGUCCAG | | | | | GCCGUGGCA | |
| 1381882 | 1381890 | AGGCUGAACUCUC | 576 | 1856 | 1878 | 1381891 | CGUGAAUGGAGA | 725 |
| | | CAUUCACGGG | | | | | GUUCAGCCU | |
| 1381887 | 1381888 | ACAGAGUCAGCCC | 577 | 1898 | 1920 | 1381889 | UUCUUUUGGGGC | 726 |
| | | CAAAAGAAUG | | | | | UGACUCUGU | |
| 1381892 | 1381895 | UCGUUUUCUGUGU | 578 | 1919 | 1941 | 1381894 | GCCAGCCAACAC | 727 |
| | | UGGCUGGCAC | | | | | AGAAAACGA | |
| 1381893 | 1381902 | CGGGCAUCAACAG | 579 | 1940 | 1962 | 1381903 | AGUUGAGCCUGU | 728 |
| | | GCUCAACUUC | | | | | UGAUGCCCG | |
| 1381896 | 1381898 | CCAGAACCUGGUC | 580 | 1982 | 2004 | 1381899 | GACCACUCGACC | 729 |
| | | GAGUGGUCAG | | | | | AGGUUCUGG | |
| 1381897 | 1381900 | AGUCCUCGGUCGG | 581 | 1961 | 1983 | 1381901 | CCCUGCUGCCGA | 730 |
| | | CAGCAGGGCG | | | | | CCGAGGACU | |
| 1381904 | 1381908 | CCGUAGUCAUGCA | 582 | 518 | 540 | 1381907 | UACCAACUUGCA | 731 |
| | | AGUUGGUACU | | | | | UGACUACGG | |
| 1381909 | 1381906 | AUUCCGCAGGGCA | 583 | 539 | 561 | 1381905 | CAUGUUGCUGCC | 732 |
| | | GCAACAUGCC | | | | | CUGCGGAAU | |
| 1381910 | 1381915 | UCUACCCCUCGGA | 584 | 560 | 582 | 1381916 | UGACAAGUUCCG | 733 |
| | | ACUUGUCAAU | | | | | AGGGGUAGA | |
| 1381911 | 1381914 | UCCGUCUUGAUAU | 585 | 2003 | 2025 | 1381913 | GUUGACAAAUAU | 734 |
| | | UUGUCAACCC | | | | | CAAGACGGA | |
| 1381912 | 1381919 | AUCUUCACUUCAG | 586 | 2024 | 2046 | 1381917 | GGAGAUCUCUGA | 735 |
| | | AGAUCUCCUC | | | | | AGUGAAGAU | |
| 1381918 | 1381921 | UCCACAUUGUCAC | 587 | 602 | 624 | 1381920 | UGAAGAAAGUG | 736 |
| | | UUUCUUCAGC | | | | | ACAAUGUGGA | |
| 1381922 | 1381924 | UCAUGUCGGAAUU | 588 | 2045 | 2067 | 1381926 | GGAUGCAGAAUU | 737 |
| | | CUGCAUCCAU | | | | | CCGACAUGA | |
| 1381923 | 1381925 | GCCAGUGGGCAAC | 589 | 581 | 603 | 1381927 | GUUUGUGUGUU | 738 |
| | | ACACAAACUC | | | | | GCCCACUGGC | |
| 1381928 | 1381932 | UGAUGAACUUCAU | 590 | 2066 | 2088 | 1381936 | CUCAGGAUAUGA | 739 |
| | | AUCCUGAGUC | | | | | AGUUCAUCA | |
| 1381929 | 1381934 | GCAAAGAACACCA | 591 | 2087 | 2109 | 1381931 | UCAAAAAUUGGU | 740 |
| | | AUUUUUGAUG | | | | | GUUCUUUGC | |
| 1381930 | 1381937 | UCCUCCUCCGCAU | 592 | 623 | 645 | 1381938 | UUCUGCUGAUGC | 741 |
| | | CAGCAGAAUC | | | | | GGAGGAGGA | |
| 1381933 | 1381941 | UUGUUUGAACCCA | 593 | 2108 | 2130 | 1381942 | AGAAGAUGUGG | 742 |
| | | CAUCUUCUGC | | | | | GUUCAAACAA | |
| 1381935 | 1381940 | CCCCACCAGACAU | 594 | 644 | 666 | 1381943 | UGACUCGGAUGU | 743 |
| | | CCGAGUCAUC | | | | | CUGGUGGGG | |
| 1381939 | 1381945 | AUGAGUCCAAUGA | 595 | 2129 | 2151 | 1381944 | AGGUGCAAUCAU | 744 |
| | | UUGCACCUUU | | | | | UGGACUCAU | |
| 1381946 | 1381955 | GCUAUGACAACAC | 596 | 2150 | 2172 | 1381951 | GGUGGGCGGUGU | 745 |
| | | CGCCCACCAU | | | | | UGUCAUAGC | |
| 1381949 | 1381954 | UGUUUCUUCUUCA | 597 | 2192 | 2214 | 1381947 | GGUGAUGCUGAA | 746 |
| | | GCAUCACCAA | | | | | GAAGAAACA | |
| 1381950 | 1381956 | AAGGUGAUGACGA | 598 | 2171 | 2193 | 1381957 | GACAGUGAUCGU | 747 |
| | | UCACUGUCGC | | | | | CAUCACCUU | |
| 1381953 | 1381952 | GCAUAGUCUGUGU | 599 | 665 | 687 | 1381948 | CGGAGCAGACAC | 748 |
| | | CUGCUCCGCC | | | | | AGACUAUGC | |
| 1381958 | 1381965 | CCAUGAUGAAUGG | 600 | 2213 | 2235 | 1381966 | GUACACAUCCAU | 749 |
| | | AUGUGUACUG | | | | | UCAUCAUGG | |
| 1381959 | 1381962 | GCGGCGUCAACCU | 601 | 2234 | 2256 | 1381961 | UGUGGUGGAGG | 750 |
| | | CCACCACACC | | | | | UUGACGCCGC | |
| 1381960 | 1381968 | UGGCGCUCCUCUG | 602 | 2255 | 2277 | 1381964 | UGUCACCCCAGA | 751 |
| | | GGGUGACAGC | | | | | GGAGCGCCA | |
| 1381963 | 1381971 | UAGGUUGGAUUU | 603 | 2297 | 2319 | 1381969 | CGGCUACGAAAA | 752 |
| | | UCGUAGCCGUU | | | | | UCCAACCUA | |
| 1381967 | 1381973 | ACUUUGUCUUCAC | 604 | 686 | 708 | 1381975 | AGAUGGGAGUG | 753 |
| | | UCCCAUCUGC | | | | | AAGACAAAGU | |
| 1381970 | 1381974 | UUCUGCUGCAUCU | 605 | 2276 | 2298 | 1381972 | CCUGUCCAAGAU | 754 |
| | | UGGACAGGUG | | | | | GCAGCAGAA | |
| 1381976 | 1381978 | UCCUCCUCUGCUA | 606 | 707 | 729 | 1381980 | AGUAGAAGUAGC | 755 |
| | | CUUCUACUAC | | | | | AGAGGAGGA | |
| 1381977 | 1381989 | UGCAUCUGCUCAA | 607 | 2318 | 2340 | 1381990 | CAAGUUCUUUGA | 756 |
| | | AGAACUUGUA | | | | | GCAGAUGCA | |
| 1381979 | 1381984 | GCUGUGGCGGGGG | 608 | 2339 | 2361 | 1381985 | GAACUAGACCCC | 757 |
| | | UCUAGUUCUG | | | | | CGCCACAGC | |
| 1381981 | 1381983 | UGCUGUCCAACUU | 609 | 2360 | 2382 | 1381987 | AGCCUCUGAAGU | 758 |
| | | CAGAGGCUGC | | | | | UGGACAGCA | |
| 1381982 | 1381991 | UCGUCAUCAUCGG | 610 | 749 | 771 | 1381986 | AGAAGAAGCCGA | 759 |
| | | cuucuucuuc | | | | | UGAUGACGA | |
| 1381988 | 1381992 | UCUUCCACCUCAG | 611 | 728 | 750 | 1381993 | AGAAGUGGCUGA | 760 |
| | | CCACUUCUUC | | | | | GGUGGAAGA | |
| 1381994 | 1381997 | UGGGUAGUGAAGC | 612 | 2381 | 2403 | 1381996 | AAACCAUUGCUU | 761 |
| | | AAUGGUUUUG | | | | | CACUACCCA | |
| 1381995 | 1382003 | UAUUCUAUAAAUG | 613 | 2402 | 2424 | 1382000 | UCGGUGUCCAUU | 762 |
| | | GACACCGAUG | | | | | UAUAGAAUA | |
| 1381998 | 1382002 | ACAGCACAGCUGU | 614 | 2465 | 2487 | 1382001 | GCCUUUUGACAG | 763 |
| | | CAAAAGGCGA | | | | | CUGUGCUGU | |
| 1381999 | 1382007 | GAUAAUGAGUAA | 615 | 2444 | 2466 | 1382005 | UUUUAUGAUUU | 764 |
| | | AUCAUAAAACG | | | | | ACUCAUUAUC | |
| 1382004 | 1382011 | CGGGUUUGUUUCU | 616 | 2423 | 2445 | 1382008 | AUGUGGGAAGA | 765 |
| | | UCCCACAUUA | | | | | AACAAACCCG | |
| 1382006 | 1382010 | GUUCAGGCAUCUA | 617 | 2486 | 2508 | 1382009 | AACACAAGUAGA | 766 |
| | | CUUGUGUUAC | | | | | UGCCUGAAC | |
| 1382012 | 1382013 | UCCUCAGCCUCUU | 618 | 791 | 813 | 1382014 | GGUAGAGGAAG | 767 |
| | | CCUCUACCUC | | | | | AGGCUGAGGA | |
| 1382015 | 1382017 | UCUGUGGCUUCUU | 619 | 812 | 834 | 1382018 | ACCCUACGAAGA | 768 |
| | | CGUAGGGUUC | | | | | AGCCACAGA | |
| 1382019 | 1382021 | AAAGAGAGAUAG | 620 | 2528 | 2550 | 1382016 | UAAUGUAUUCUA | 769 |
| | | AAUACAUUACU | | | | | UCUCUCUUU | |
| 1382020 | 1382024 | CUGAUGUGUGGAU | 621 | 2507 | 2529 | 1382022 | UUGAAUUAAUCC | 770 |
| | | UAAUUCAAGU | | | | | ACACAUCAG | |
| 1382023 | 1382029 | GUGGCAAUGCUGG | 622 | 833 | 855 | 1382028 | GAGAACCACCAG | 771 |
| | | UGGUUCUCUC | | | | | CAUUGCCAC | |
| 1382025 | 1382027 | GUAGUAUAGAGAC | 623 | 2549 | 2571 | 1382026 | ACAUUUUGGUCU | 772 |
| | | CAAAAUGUAA | | | | | CUAUACUAC | |
| 1382030 | 1382032 | UCAUCACCAUCCU | 624 | 770 | 792 | 1382031 | GGACGAUGAGGA | 773 |
| | | CAUCGUCCUC | | | | | UGGUGAUGA | |
| 1382033 | 1382038 | UACACAAAACCCA | 625 | 2570 | 2592 | 1382035 | AUUAUUAAUGG | 774 |
| | | UUAAUAAUGU | | | | | GUUUUGUGUA | |
| 1382034 | 1382037 | AUACAGCUAAAUU | 626 | 2591 | 2613 | 1382042 | CUGUAAAGAAUU | 775 |
| | | CUUUACAGUA | | | | | UAGCUGUAU | |
| 1382036 | 1382041 | UCUGUGGUGGUGG | 627 | 854 | 876 | 1382040 | CACCACCACCAC | 776 |
| | | UGGUGGUGGU | | | | | CACCACAGA | |
| 1382039 | 1382046 | AUCUAUUCAUGCA | 628 | 2612 | 2634 | 1382047 | CAAACUAGUGCA | 777 |
| | | CUAGUUUGAU | | | | | UGAAUAGAU | |
| 1382043 | 1382044 | CGAACCACCUCUU | 629 | 875 | 897 | 1382045 | GUCUGUGGAAGA | 778 |
| | | CCACAGACUC | | | | | GGUGGUUCG | |
| 1382051 | 1382064 | GUGAUAAAUAAUC | 630 | 2633 | 2655 | 1382060 | UCUCUCCUGAUU | 779 |
| | | AGGAGAGAAU | | | | | AUUUAUCAC | |
| 1382052 | 1382058 | UCACAAACCACAA | 631 | 2675 | 2697 | 1382055 | UAUUAUUCUUGU | 780 |
| | | GAAUAAUAUA | | | | | GGUUUGUGA | |
| 1382053 | 1382057 | UACAACUGGCUAA | 632 | 2654 | 2676 | 1382056 | AUAGCCCCUUAG | 781 |
| | | GGGGCUAUGU | | | | | CCAGUUGUA | |
| 1382054 | 1382061 | GUAAAGUAGGACU | 633 | 2696 | 2718 | 1382062 | CCCAAUUAAGUC | 782 |
| | | UAAUUGGGUC | | | | | CUACUUUAC | |
| 1382059 | 1382068 | CCAUCGAUUCUUA | 634 | 2717 | 2739 | 1382065 | AUAUGCUUUAAG | 783 |
| | | AAGCAUAUGU | | | | | AAUCGAUGG | |
| 1382063 | 1382067 | CACGUUCACAUGA | 635 | 2738 | 2760 | 1382066 | GGGAUGCUUCAU | 784 |
| | | AGCAUCCCCC | | | | | GUGAACGUG | |
| 1382069 | 1382076 | CAAGAGAAGCAGC | 636 | 2759 | 2781 | 1382072 | GGAGUUCAGCUG | 785 |
| | | UGAACUCCCA | | | | | CUUCUCUUG | |
| 1382070 | 1382074 | AUCAGGAAAGGAA | 637 | 2780 | 2802 | 1382073 | CCUAAGUAUUCC | 786 |
| | | UACUUAGGCA | | | | | UUUCCUGAU | |
| 1382071 | 1382077 | AUCUGAAAUACUU | 638 | 2822 | 2844 | 1382079 | ACAUUUUUAAGU | 787 |
| | | AAAAAUGUUU | | | | | AUUUCAGAU | |
| 1382075 | 1382081 | UUAACUUUAAAAU | 639 | 2801 | 2823 | 1382082 | CACUAUGCAUUU | 788 |
| | | GCAUAGUGAU | | | | | UAAAGUUAA | |
| 1382078 | 1382085 | GAAAAAAAAUCUC | 640 | 2843 | 2865 | 1382083 | GCUUUAGAGAGA | 789 |
| | | UCUAAAGCAU | | | | | UUUUUUUUC | |
| 1382080 | 1382086 | GUACAGUAAAAUG | 641 | 2864 | 2886 | 1382084 | CAUGACUGCAUU | 790 |
| | | CAGUCAUGGA | | | | | UUACUGUAC | |
| 1382087 | 1382095 | AUAUAGCAGAAGC | 642 | 2885 | 2907 | 1382098 | AGAUUGCUGCUU | 791 |
| | | AGCAAUCUGU | | | | | CUGCUAUAU | |
| 1382088 | 1382092 | CUCUUAAUUCCUA | 643 | 2906 | 2928 | 1382091 | UUGUGAUAUAG | 792 |
| | | UAUCACAAAU | | | | | GAAUUAAGAG | |
| 1382089 | 1382093 | GAAGAAACAAACG | 644 | 2927 | 2949 | 1382097 | GAUACACACGUU | 793 |
| | | UGUGUAUCCU | | | | | UGUUUCUUC | |
| 1382090 | 1382096 | GUGUGCACAUAAA | 645 | 2948 | 2970 | 1382100 | GUGCCUGUUUUA | 794 |
| | | ACAGGCACGA | | | | | UGUGCACAC | |
| 1382103 | 1382101 | CUUGAAGUCUCAA | 646 | 2969 | 2991 | 1382102 | AUUAGGCAUUGA | 795 |
| | | UGCCUAAUGU | | | | | GACUUCAAG | |
| 1382104 | 1382099 | ACGUGGACAAAAA | 647 | 2990 | 3012 | 1382094 | CUUUUCUUUUUU | 796 |
| | | AAGAAAAGCU | | | | | UGUCCACGU | |
| 1382105 | 1382110 | CUUUAUCAAAGAC | 648 | 3011 | 3033 | 1382118 | AUCUUUGGGUCU | 797 |
| | | CCAAAGAUAC | | | | | UUGAUAAAG | |
| 1382106 | 1382112 | ACCAGCAGAGCAC | 649 | 3074 | 3096 | 1382108 | GGGGAGGGGUGC | 798 |
| | | CCCUCCCCAC | | | | | UCUGCUGGU | |
| 1382107 | 1382111 | ACCCGCCCCGUAA | 650 | 3053 | 3075 | 1382114 | AAGCACUUUUAC | 799 |
| | | AAGUGCUUAC | | | | | GGGGCGGGU | |
| 1382116 | 1382113 | ACAAUGAACAGGG | 651 | 3032 | 3054 | 1382109 | AAAAGAAUCCCU | 800 |
| | | AUUCUUUUCU | | | | | GUUCAUUGU | |
| 1382119 | 1382115 | GAGAAUUCUUGGU | 652 | 3095 | 3117 | 1382117 | CUUCAAUUACCA | 801 |
| | | AAUUGAAGAC | | | | | AGAAUUCUC | |
| 1382207 | 1382216 | CCUCUCGAACCAC | 653 | 880 | 902 | 1382215 | UGGAAGAGGUG | 802 |
| | | CUCUUCCACA | | | | | GUUCGAGAGG | |
| 1382208 | 1382210 | UCUCGGCUUGUUC | 654 | 901 | 923 | 1382211 | UGUGCUCUGAAC | 803 |
| | | AGAGCACACC | | | | | AAGCCGAGA | |
| 1382212 | 1382217 | UCAUUGCUCGGCA | 655 | 922 | 944 | 1382218 | CGGGGCCGUGCC | 804 |
| | | CGGCCCCGUC | | | | | GAGCAAUGA | |
| 1382222 | 1382230 | CAUCAAAGUACCA | 656 | 943 | 965 | 1382232 | UCUCCCGCUGGU | 805 |
| | | GCGGGAGAUC | | | | | ACUUUGAUG | |
| 1382229 | 1382235 | GGGCACACUUCCC | 657 | 964 | 986 | 1382236 | UGACUGAAGGGA | 806 |
| | | UUCAGUCACA | | | | | AGUGUGCCC | |
| 1382237 | 1382241 | CCAUGCAGUACUC | 658 | 1027 | 1049 | 1382242 | ACACAGAAGAGU | 807 |
| | | UUCUGUGUCA | | | | | ACUGCAUGG | |
| 1382239 | 1382244 | CACAUCCGCCGUA | 659 | 985 | 1007 | 1382245 | CAUUCUUUUACG | 808 |
| | | AAAGAAUGGG | | | | | GCGGAUGUG | |
| 1382240 | 1382249 | ACAUGGCGCUGCC | 660 | 1048 | 1070 | 1382248 | CCGUGUGUGGCA | 809 |
| | | ACACACGGCC | | | | | GCGCCAUGU | |
| 1382243 | 1382238 | CAAAGUUGUUCCG | 661 | 1006 | 1028 | 1382247 | GCGGCAACCGGA | 810 |
| | | GUUGCCGCCA | | | | | ACAACUUUG | |
| 1382256 | 1382263 | CUCGGGCAAGAGG | 662 | 1090 | 1112 | 1382260 | CCCAGGAACCUC | 811 |
| | | UUCCUGGGUA | | | | | UUGCCCGAG | |
| 1382259 | 1382261 | UAGUCUUGAGUAA | 663 | 1069 | 1091 | 1382262 | CCCAAAGUUUAC | 812 |
| | | ACUUUGGGAC | | | | | UCAAGACUA | |
| 1382269 | 1382266 | ACUGGCUGCUGUU | 664 | 1122 | 1144 | 1382267 | CUUCCUACAACA | 813 |
| | | GUAGGAAGUU | | | | | GCAGCCAGU | |
| 1382273 | 1382276 | UUGUAGGAAGUU | 665 | 1111 | 1133 | 1382275 | AUCCUGUUAAAC | 814 |
| | | UAACAGGAUCU | | | | | UUCCUACAA | |

TABLE 15
RNAi compounds targeting human APP SEQ ID No: 3

| | | | | SEQ ID | SEQ ID | | | |
|---|---|---|---|---|---|---|---|---|
| | | Antisense | SEQ | NO: 3 | NO: 3 | | | |
| Compound | Antisense | Sequence | ID | Antisense | Antisense | Sense | Sense Sequence | SEQ |
| Number | oligo ID | (5′ to 3′) | NO | Start Site | Stop Site | oligo ID | (5′ to 3′) | ID NO |
| 1376142 | 1378900 | GCCGUCUCCCGGG | 815 | 63 | 85 | 1378899 | GCGGGGGCCCC | 841 |
| | | GCCCCCGCGC | | | | | GGGAGACGGC | |
| 1376283 | 1376285 | CGCCUACCGCUGC | 816 | 21 | 43 | 1378828 | UUUCCUCGGCA | 842 |
| | | CGAGGAAACU | | | | | GCGGUAGGCG | |
| 1378827 | 1378829 | GCACGCUCCUCCG | 817 | 42 | 64 | 1378830 | AGAGCACGCGG | 843 |
| | | CGUGCUCUCG | | | | | AGGAGCGUGC | |
| 1378897 | 1378901 | UCUGCCCGCGCCG | 818 | 84 | 106 | 1378898 | GGCGGUGGCGG | 844 |
| | | CCACCGCCGC | | | | | CGCGGGCAGA | |
| 1381703 | 1381705 | UGGGAUCCGCCG | 819 | 105 | 127 | 1381704 | GCAAGGACGCG | 845 |
| | | CGUCCUUGCUC | | | | | GCGGAUCCCA | |
| 1381706 | 1381708 | CCGAGUGCGCUG | 820 | 126 | 148 | 1381707 | CUCGCACAGCA | 846 |
| | | CUGUGCGAGUG | | | | | GCGCACUCGG | |
| 1382120 | 1382121 | AUCCUGCAGAAA | 821 | 3192 | 3214 | 1382122 | CAAAACAAUUU | 847 |
| | | AUUGUUUUGGA | | | | | UCUGCAGGAU | |
| 1382123 | 1382129 | UAAUUUAUUUAU | 822 | 3255 | 3277 | 1382126 | CUGUAUUACAU | 848 |
| | | GUAAUACAGUG | | | | | AAAUAAAUUA | |
| 1382124 | 1382131 | UGUAGAAAGCGA | 823 | 3234 | 3256 | 1382125 | AUGACAUGAUC | 849 |
| | | UCAUGUCAUAA | | | | | GCUUUCUACA | |
| 1382128 | 1382134 | AAGCAAUGAUUC | 824 | 3213 | 3235 | 1382127 | GAUUGUACAGA | 850 |
| | | UGUACAAUCAU | | | | | AUCAUUGCUU | |
| 1382130 | 1382136 | CUUGCCCGGGGU | 825 | 3276 | 3298 | 1382135 | AAUAAAAUAAC | 851 |
| | | UAUUUUAUUUA | | | | | CCCGGGCAAG | |
| 1382132 | 1382137 | AGUCAUCCUUCA | 826 | 3297 | 3319 | 1382139 | ACUUUUCUUUG | 852 |
| | | AAGAAAAGUCU | | | | | AAGGAUGACU | |
| 1382133 | 1382138 | CUUCGAUUAUUU | 827 | 3318 | 3340 | 1382140 | ACAGACAUUAA | 853 |
| | | AAUGUCUGUAG | | | | | AUAAUCGAAG | |
| 1382141 | 1382145 | UUAAAGAAAAUU | 828 | 3360 | 3382 | 1382146 | GGCAGAUUCAA | 854 |
| | | GAAUCUGCCUC | | | | | UUUUCUUUAA | |
| 1382142 | 1382148 | UCUUCUCCCCACC | 829 | 3339 | 3361 | 1382143 | UAAUUUUGGGU | 855 |
| | | CAAAAUUACU | | | | | GGGGAGAAGA | |
| 1382144 | 1382150 | AUUUUCAUCUUC | 830 | 3402 | 3424 | 1382149 | GAUACAAAAGA | 856 |
| | | UUUUGUAUCAU | | | | | AGAUGAAAAU | |
| 1382147 | 1382153 | AUAAAUGAAACU | 831 | 3381 | 3403 | 1382155 | CCAGUCUGAAG | 857 |
| | | UCAGACUGGUU | | | | | UUUCAUUUAU | |
| 1382151 | 1382154 | UGUCCAGGCAUG | 832 | 3444 | 3466 | 1382157 | UGAGGAAGGCA | 858 |
| | | CCUUCCUCAUC | | | | | UGCCUGGACA | |
| 1382152 | 1382156 | UCCCCUUAUAUU | 833 | 3423 | 3445 | 1382158 | GGAAGUGGCAA | 859 |
| | | GCCACUUCCAU | | | | | UAUAAGGGGA | |
| 1382159 | 1382164 | ACACAUCUUAAA | 834 | 3465 | 3487 | 1382160 | AACCCUUCUUU | 860 |
| | | AGAAGGGUUUG | | | | | UAAGAUGUGU | |
| 1382161 | 1382168 | UGUAUUUAUUUA | 835 | 3507 | 3529 | 1382167 | GUUUUCAUGUA | 861 |
| | | CAUGAAAACAC | | | | | AAUAAAUACA | |
| 1382162 | 1382166 | ACCAUUUUAUAC | 836 | 3486 | 3508 | 1382165 | CUUCAAUUUGU | 862 |
| | | AAAUUGAAGAC | | | | | AUAAAAUGGU | |
| 1382163 | 1382169 | UGCUCCUCCAAG | 837 | 3521 | 3543 | 1382170 | AAAUACAUUCU | 863 |
| | | AAUGUAUUUAU | | | | | UGGAGGAGCA | |
| 1382270 | 1382271 | GAAUGGCGCUGC | 838 | 1181 | 1203 | 1382272 | CCGUGUGUGGC | 864 |
| | | CACACACGGCC | | | | | AGCGCCAUUC | |
| 1382274 | 1382277 | UACUGGCUGCUG | 839 | 1199 | 1221 | 1382197 | UUCCUACAACA | 865 |
| | | UUGUAGGAAUG | | | | | GCAGCCAGUA | |
| 1382278 | 1382279 | ACUGACGGAGCC | 840 | 1 | 23 | 1382280 | CCGCGCUCGGGC | 866 |
| | | CGAGCGCGGCG | | | | | UCCGUCAGU | |

TABLE 16
RNAi targeting human APP SEQ ID No: 4

| | | | | SEQ ID | SEQ ID | | | |
|---|---|---|---|---|---|---|---|---|
| | | Antisense | SEQ | NO: 4 | NO: 4 | | | |
| Compound | Antisense | Sequence | ID | Antisense | Antisense | Sense | Sense Sequence | SEQ |
| Number | oligo ID | (5′ to 3′) | NO | Start Site | Stop Site | oligo ID | (5′ to 3′) | ID NO |
| 1382173 | 1382178 | GGAACUCGAACC | 867 | 994 | 1016 | 1382177 | GGAAGAGGUGGU | 889 |
| | | ACCUCUUCCAC | | | | | UCGAGUUCC | |
| 1382172 | 1382179 | UAGGAACUCGAA | 868 | 996 | 1018 | 1382174 | AAGAGGUGGUUC | 890 |
| | | CCACCUCUUCC | | | | | GAGUUCCUA | |
| 1382175 | 1382183 | AACUCGAACCACC | 869 | 992 | 1014 | 1382180 | GUGGAAGAGGUG | 891 |
| | | UCUUCCACAG | | | | | GUUCGAGUU | |
| 1382176 | 1382182 | AGGAACUCGAAC | 870 | 995 | 1017 | 1382184 | GAAGAGGUGGUU | 892 |
| | | CACCUCUUCCA | | | | | CGAGUUCCU | |
| 1382181 | 1382185 | GAACUCGAACCA | 871 | 993 | 1015 | 1382188 | UGGAAGAGGUGG | 893 |
| | | CCUCUUCCACA | | | | | UUCGAGUUC | |
| 1382171 | 1382186 | ACUCGAACCACCU | 872 | 991 | 1013 | 1382187 | UGUGGAAGAGGU | 894 |
| | | CUUCCACAGA | | | | | GGUUCGAGU | |
| 1382191 | 1382194 | UACUGGCUGCUG | 873 | 1011 | 1033 | 1382197 | UUCCUACAACAG | 865 |
| | | UUGUAGGAACU | | | | | CAGCCAGUA | |
| 1382190 | 1382199 | UUGUAGGAACUC | 874 | 999 | 1021 | 1382192 | AGGUGGUUCGAG | 895 |
| | | GAACCACCUCU | | | | | UUCCUACAA | |
| 1382193 | 1382198 | ACUGGCUGCUGU | 875 | 1010 | 1032 | 1382200 | GUUCCUACAACA | 896 |
| | | UGUAGGAACUC | | | | | GCAGCCAGU | |
| 1382189 | 1382195 | GUAGGAACUCGA | 876 | 997 | 1019 | 1382196 | AGAGGUGGUUCG | 897 |
| | | ACCACCUCUUC | | | | | AGUUCCUAC | |
| 1382206 | 1382204 | GUACUGGCUGCU | 877 | 1012 | 1034 | 1382201 | UCCUACAACAGC | 898 |
| | | GUUGUAGGAAC | | | | | AGCCAGUAC | |
| 1382205 | 1382203 | GUUGUAGGAACU | 878 | 1000 | 1022 | 1382202 | GGUGGUUCGAGU | 899 |
| | | CGAACCACCUC | | | | | UCCUACAAC | |
| 1382209 | 1382214 | CUGUUGUAGGAA | 879 | 1002 | 1024 | 1382213 | UGGUUCGAGUUC | 900 |
| | | CUCGAACCACC | | | | | CUACAACAG | |
| 1382219 | 1382223 | UGUAGGAACUCG | 880 | 998 | 1020 | 1382221 | GAGGUGGUUCGA | 901 |
| | | AACCACCUCUU | | | | | GUUCCUACA | |
| 1382220 | 1382226 | UGUUGUAGGAAC | 881 | 1001 | 1023 | 1382224 | GUGGUUCGAGUU | 902 |
| | | UCGAACCACCU | | | | | CCUACAACA | |
| 1382228 | 1382234 | UGCUGUUGUAGG | 882 | 1004 | 1026 | 1382233 | GUUCGAGUUCCU | 903 |
| | | AACUCGAACCA | | | | | ACAACAGCA | |
| 1382225 | 1382231 | GCUGUUGUAGGA | 883 | 1003 | 1025 | 1382227 | GGUUCGAGUUCC | 904 |
| | | ACUCGAACCAC | | | | | UACAACAGC | |
| 1382250 | 1382251 | CUGCUGUUGUAG | 884 | 1005 | 1027 | 1382253 | UUCGAGUUCCUA | 905 |
| | | GAACUCGAACC | | | | | CAACAGCAG | |
| 1382246 | 1382254 | GGCUGCUGUUGU | 885 | 1007 | 1029 | 1382252 | CGAGUUCCUACA | 906 |
| | | AGGAACUCGAA | | | | | ACAGCAGCC | |
| 1382255 | 1382257 | UGGCUGCUGUUG | 886 | 1008 | 1030 | 1382258 | GAGUUCCUACAA | 907 |
| | | UAGGAACUCGA | | | | | CAGCAGCCA | |
| 1382268 | 1382265 | GCUGCUGUUGUA | 887 | 1006 | 1028 | 1382264 | UCGAGUUCCUAC | 908 |
| | | GGAACUCGAAC | | | | | AACAGCAGC | |
| 1382048 | 1382050 | CUGGCUGCUGUU | 888 | 1009 | 1031 | 1382049 | AGUUCCUACAAC | 909 |
| | | GUAGGAACUCG | | | | | AGCAGCCAG | |

### Example 5: Effect of RNAi Compounds on Human APP RNA In Vitro, Single Dose

[0849] Double-stranded RNAi compounds described above were tested in a series of experiments under the same culture conditions. The results for each experiment are presented in separate tables below.

[0850] Cultured HeLa cells at a density of 6000 cells per well were transfected using RNAiMAX with 20 nM of double-stranded RNAi. After a treatment period of approximately 24 hours, RNA was isolated from the cells and APP RNA levels were measured by quantitative real-time RTPCR. Human primer probe set RTS35571 (described herein above) was used to measure RNA levels. APP RNA levels were normalized to total RNA content, as measured by RIBOGREEN®. Results are presented as percent change of APP RNA, relative to PBS control. The symbol “f” indicates that the modified oligonucleotide is complementary to the target transcript within the amplicon region of the primer probe set and so the associated data is not reliable. In such instances, additional assays using alternative primer probes must be performed to accurately assess the potency and efficacy of such modified oligonucleotides.

TABLE 17
Reduction of APP RNA by RNAi

| Compound | APP RNA |
|---|---|
| Number | (% control) |
| 1376283 | 96 |
| 1378827 | 102 |
| 1376142 | 135 |
| 1378897 | 96 |
| 1381703 | 59 |
| 1381706 | 40 |
| 1381710 | 81 |
| 1381709 | 18 |
| 1381712 | 92 |
| 1381734 | 91 |
| 1381733 | 33 |
| 1381735 | 8 |
| 1381736 | 38 |
| 1381740 | 17 |
| 1381755 | 7 |
| 1381771 | 20 |
| 1381772 | 8 |
| 1381778 | 11 |
| 1381773 | 30 |
| 1381776 | 18 |
| 1381789 | 24 |
| 1381790 | 35 |
| 1381798 | 50 |
| 1381809 | 26 |
| 1381810 | 33 |
| 1381817 | 70 |
| 1381818 | 16 |
| 1381825 | 10 |
| 1381830 | 88 |
| 1381832 | 8 |
| 1381835 | 56 |
| 1381842 | 58 |
| 1381909 | 76 |
| 1381904 | 3 |
| 1381910 | 90 |
| 1381918 | 9 |
| 1381923 | 20 |
| 1381930 | 85 |
| 1381935 | 76 |
| 1381953 | 21 |
| 1381982 | 14 |
| 1381988 | 25 |
| 1382030 | 15 |
| 1382173 | 88 |
| 1382172 | 94 |
| 1382176 | 89 |
| 1382175 | 49 |
| 1382181 | 82 |
| 1382171 | 26 |
| 1382191 | 28 |
| 1382189 | 88 |
| 1382193 | 105 |
| 1382190 | 87 |
| 1382205 | 99 |
| 1382206 | 75 |
| 1382208 | 27 |
| 1382209 | 83 |
| 1382207 | 75 |
| 1382212 | 81 |
| 1382219 | 66 |
| 1382220 | 87 |
| 1382222 | 58 |
| 1382225 | 108 |
| 1382228 | 109 |
| 1382229 | 40 |
| 1382243 | 28 |
| 1382237 | 28 |
| 1382239 | 63 |
| 1382240 | 60 |
| 1382250 | 86 |
| 1382246 | 101 |
| 1382255 | 96 |
| 1382259 | 55 |
| 1382256 | 83 |
| 1382268 | 100 |
| 1382269 | 64 |
| 1382270 | 66 |
| 1382273 | 51 |
| 1382274 | 47 |
| 1382278 | 93 |

TABLE 18
Reduction of APP RNA by RNAi

| Compound | APP RNA |
|---|---|
| Number | (% control) |
| 1381718 | 51 |
| 1381721 | 53 |
| 1381723 | 61 |
| 1381725 | 51 |
| 1381727 | 98 |
| 1381746 | 66 |
| 1381751 | 15 |
| 1381756 | 9 |
| 1381752 | 8 |
| 1381761 | 68 |
| 1381759 | 50 |
| 1381782 | 21 |
| 1381791 | 32 |
| 1381792 | 76 |
| 1381795 | 90 |
| 1381802 | 66 |
| 1381808 | 98 |
| 1381826 | 9 |
| 1381828 | 72 |
| 1381840 | 29 |
| 1381844 | 63 |
| 1381850 | 45 |
| 1381853 | 7 |
| 1381854 | 71 |
| 1381858 | 23 |
| 1381855 | 44 |
| 1381861 | 8 |
| 1381864 | 13 |
| 1381872 | 42 |
| 1381874 | 6 |
| 1381875 | 56 |
| 1381876 | 8 |
| 1381879 | 72 |
| 1381887 | 82 |
| 1381882 | 32 |
| 1381892 | 5 |
| 1381896 | 89 |
| 1381897 | 73 |
| 1381893 | 17 |
| 1381911 | 19 |
| 1381912 | 17 |
| 1381922 | 9 |
| 1381928 | 10 |
| 1381929 | 14 |
| 1381933 | 16 |
| 1381939 | 7 |
| 1381949 | 13 |
| 1381946 | 49 |
| 1381950 | 37 |
| 1381959 | 62 |
| 1381958 | 8 |
| 1381960 | 97 |
| 1381963 | 12 |
| 1381967 | 13 |
| 1381970 | 8 |
| 1381976 | 70 |
| 1381981 | 13 |
| 1381979 | 97 |
| 1381977 | 16 |
| 1381994 | 12 |
| 1381998 | 13 |
| 1381995 | 9 |
| 1381999 | 8 |
| 1382006 | 10 |
| 1382004 | 8 |
| 1382012 | 35 |
| 1382015 | 60 |
| 1382019 | 7 |
| 1382020 | 11 |
| 1382025 | 8 |
| 1382023 | 38 |
| 1382034 | 6 |
| 1382033 | 10 |
| 1382036 | 89 |
| 1382043 | 62 |
| 1382039 | 17 |
| 1382048 | 89 |
| 1382053 | 38 |
| 1382051 | 9 |
| 1382059 | 8 |

TABLE 19
Reduction of APP RNA by RNAi

| Compound | APP RNA |
|---|---|
| Number | (% control) |
| 1382052 | 12 |
| 1382054 | 5 |
| 1382063 | 16 |
| 1382070 | 10 |
| 1382069 | 10 |
| 1382071 | 10 |
| 1382075 | 7 |
| 1382078 | 11 |
| 1382080 | 13 |
| 1382088 | 14 |
| 1382089 | 5 |
| 1382087 | 9 |
| 1382090 | 7 |
| 1382104 | 4 |
| 1382103 | 6 |
| 1382105 | 5 |
| 1382107 | 30 |
| 1382106 | 41 |
| 1382116 | 7 |
| 1382119 | 7 |
| 1382120 | 8 |
| 1382123 | 5 |
| 1382124 | 7 |
| 1382128 | 5 |
| 1382130 | 67 |
| 1382132 | 51 |
| 1382133 | 57 |
| 1382141 | 60 |
| 1382142 | 67 |
| 1382144 | 68 |
| 1382147 | 56 |
| 1382151 | 66 |
| 1382152 | 62 |
| 1382159 | 62 |
| 1382162 | 54 |
| 1382161 | 51 |
| 1382163 | 64 |

### Example 6: Activity of Modified Oligonucleotides Complementary to Human APP in Transgenic Mice

[0851] Compounds described above are tested in the Tc1 transgenic mouse model which contains a freely segregating, almost complete human chromosome 21 (Hsa21) with 92% of all known Hsa21 genes including APP (O'Doherty et al., Science 2005 309(5743):2033-2037). Compounds are also tested in the R1.40 YAC transgenic mouse model which contains the entire human APP gene harboring the Swedish mutations (K670N/M671L) as described in Lamb et al., Human Mol Genetics 1997, 6(9):1535-41. Groups of 2-3 mice are injected ICV with 300 ug ASO or PBS control, and sacrificed at 2 weeks post dosing. Various CNS tissues are collected. APP RNA are measured by RT-PCR as described in Example 1 above.

The application's sequence listing, which the Patent Office published only in electronic form, follows.

SEQUENCE LISTING (915 sequences)

SEQ ID NO: 1 - DNA, 3120 bp, Homo sapiens
cagcagcgcactcggtgccccgcgcagggtcgcgatgctgcccggtttggcactgctcctgctggccgcctggacggctcgggcgctggaggtacccactgatggtaatgctggcctgctggctgaaccccagattgccatgttctgtggcagactgaacatgcacatgaatgtccagaatgggaagtgggattcagatccatcagggaccaaaacctgcattgataccaaggaaggcatcctgcagtattgccaagaagtctaccctgaactgcagatcaccaatgtggtagaagccaaccaaccagtgaccatccagaactggtgcaagcggggccgcaagcagtgcaagacccatccccactttgtgattccctaccgctgcttagttggtgagtttgtaagtgatgcccttctcgttcctgacaagtgcaaattcttacaccaggagaggatggatgtttgcgaaactcatcttcactggcacaccgtcgccaaagagacatgcagtgagaagagtaccaacttgcatgactacggcatgttgctgccctgcggaattgacaagttccgaggggtagagtttgtgtgttgcccactggctgaagaaagtgacaatgtggattctgctgatgcggaggaggatgactcggatgtctggtggggcggagcagacacagactatgcagatgggagtgaagacaaagtagtagaagtagcagaggaggaagaagtggctgaggtggaagaagaagaagccgatgatgacgaggacgatgaggatggtgatgaggtagaggaagaggctgaggaaccctacgaagaagccacagagagaaccaccagcattgccaccaccaccaccaccaccacagagtctgtggaagaggtggttcgagaggtgtgctctgaacaagccgagacggggccgtgccgagcaatgatctcccgctggtactttgatgtgactgaagggaagtgtgccccattcttttacggcggatgtggcggcaaccggaacaactttgacacagaagagtactgcatggccgtgtgtggcagcgccatgtcccaaagtttactcaagactacccaggaacctcttgcccgagatcctgttaaacttcctacaacagcagccagtacccctgatgccgttgacaagtatctcgagacacctggggatgagaatgaacatgcccatttccagaaagccaaagagaggcttgaggccaagcaccgagagagaatgtcccaggtcatgagagaatgggaagaggcagaacgtcaagcaaagaacttgcctaaagctgataagaaggcagttatccagcatttccaggagaaagtggaatctttggaacaggaagcagccaacgagagacagcagctggtggagacacacatggccagagtggaagccatgctcaatgaccgccgccgcctggccctggagaactacatcaccgctctgcaggctgttcctcctcggcctcgtcacgtgttcaatatgctaaagaagtatgtccgcgcagaacagaaggacagacagcacaccctaaagcatttcgagcatgtgcgcatggtggatcccaagaaagccgctcagatccggtcccaggttatgacacacctccgtgtgatttatgagcgcatgaatcagtctctctccctgctctacaacgtgcctgcagtggccgaggagattcaggatgaagttgatgagctgcttcagaaagagcaaaactattcagatgacgtcttggccaacatgattagtgaaccaaggatcagttacggaaacgatgctctcatgccatctttgaccgaaacgaaaaccaccgtggagctccttcccgtgaatggagagttcagcctggacgatctccagccgtggcattcttttggggctgactctgtgccagccaacacagaaaacgaagttgagcctgttgatgcccgccctgctgccgaccgaggactgaccactcgaccaggttctgggttgacaaatatcaagacggaggagatctctgaagtgaagatggatgcagaattccgacatgactcaggatatgaagttcatcatcaaaaattggtgttctttgcagaagatgtgggttcaaacaaaggtgcaatcattggactcatggtgggcggtgttgtcatagcgacagtgatcgtcatcaccttggtgatgctgaagaagaaacagtacacatccattcatcatggtgtggtggaggttgacgccgctgtcaccccagaggagcgccacctgtccaagatgcagcagaacggctacgaaaatccaacctacaagttctttgagcagatgcagaactagacccccgccacagcagcctctgaagttggacagcaaaaccattgcttcactacccatcggtgtccatttatagaataatgtgggaagaaacaaacccgttttatgatttactcattatcgccttttgacagctgtgctgtaacacaagtagatgcctgaacttgaattaatccacacatcagtaatgtattctatctctctttacattttggtctctatactacattattaatgggttttgtgtactgtaaagaatttagctgtatcaaactagtgcatgaatagattctctcctgattatttatcacatagccccttagccagttgtatattattcttgtggtttgtgacccaattaagtcctactttacatatgctttaagaatcgatgggggatgcttcatgtgaacgtgggagttcagctgcttctcttgcctaagtattcctttcctgatcactatgcattttaaagttaaacatttttaagtatttcagatgctttagagagattttttttccatgactgcattttactgtacagattgctgcttctgctatatttgtgatataggaattaagaggatacacacgtttgtttcttcgtgcctgttttatgtgcacacattaggcattgagacttcaagcttttctttttttgtccacgtatctttgggtctttgataaagaaaagaatccctgttcattgtaagcacttttacggggcgggtggggaggggtgctctgctggtcttcaattaccaagaattctccaa

SEQ ID NO: 2 - DNA, 296000 bp, Homo sapiens
gtactgtaaaaagacacagacaagccagaacacatttagagaatggccaaggtgtggaaggaaccagaaaccatgccattatgcaactgttgaaggaagtgcctgttttaccttgtgaagagaagactctagaggaagaagtagcatgaaaaccgctggcaaatttgtaaagatctgaagtgtggaaaagaattattctgcttggtcactggggatacaaggatatctgagtgggagtttaaaggcgggggatgtgagctttaaatgggataagaacattctagtaaccagaaatgcccaaagatagaatgcacagtctggagagccagtgaatatctcacaaatggagacacttgaaactaggatggggatgctgttgtaggaattccagcagacaagtggttgttggttccttccccaactttgtagggttataactagggatgttcctgcgttttctgcttggaggatctgcaagacacctcagggcaggaaatggcattaaatgcagaacagagctagtggctgaaaagcaaaaagccatcaggatctctgagtagtgaaggaaccagagaacatgcaggcaatgtccatcattctgacgcaatcagcagcataatcatcttcccccaggaacatcttgaccagggaatgtgtcagtgtggtgaatttcaacagtggaaagagaaactgctaaatctaagaactttaatttttatagattatgatctcatctctacaattttgaatttcatgctcaataaaagttccttactctctttttttttttttgagacggagtctcgctctgtcgcccaggctggagtgcagtggcgcgatctcggctcacttcaagctcagcctcccgggttcacgccattctcctgcctcagcctccccagtagctgggactacaggcgcccgccacgacgcccggctaattttttgtatttttagtagagacggggtttcaccgtgttagccaggatggtgttgatctcctgacctcgtgatccgcccgcctcagcctcccaaagaaaagtccctcactcttaaagttgcctcctccttcccagggctggcttcatgggcatgcaaccctggagagtctcacaggccctgcggtgggaggagccccatgcttggtttaacgctctgccattgccatcttaaaattcttaatttaattttttttcttttttttgaggtggagtctcgctctgtcgcccaggctggagtgcaatggcacaatcttggctcactgcaacctccgcctcccaggttcaagcgattctcctgcctcagcctctggagtagctgggattacaggcaggagtaaccacgctcggctaatttttgcatttttagtagagatgggggtttcaccatgttggccaggctggtctagaactcctgacctcaggtgatctgcccacctgggcctcctaaagtgctgggattacaggcatgagccaccaggcccggccttaaaattcttaataatgtaacaaagggtctcacgtttgcattttgcagtggactctgcaagatttgtagctttggaccacgtttctctttgcattcagataccttcttttttgccttatttgctcatgcagacccggaacaaatacggaattgcggtgggtaaatgtggtgcagaaagtgaacaactgggtttgtcctgtcactttaggcttttccctgctgtcccagcttcatgtcacttacttgctattagatttgggagttcattagcttcattttcctgatgtataaataggaataatagtaacagcctctttggcttttgtaggaagtaaatgacatgaagcgtataaacaaatactgcatgacaataaatatttgtccttatttgttgaggacatccaaaggacattcaggggcaaaagtaatccaagagtcaagactgaatgcctagtgcgggaaaagacacacaagacaacatttaggggagctggtacagaaatgacttcccaggaaggaagtctgtaccccgctggctgagccatccttcccgggcctaggcacccttgtcagcgcaatgagcaagggagagaaggcaggctgcagtgcagccctcagaagggccagagcactccctggcttcagtccttcgctccaagccctgtgtggagtgggctgtggcttggtaactaaatgctacttcaggtcaagagcaggggatatatctgggcagttctagagcattctaaactatctggacactaactggacagtggacggtttgtgtttaatccaggagaaagtggcatggcagaaggttcatttctataattcaggacagacacaatgaagaacaagggcagcgtttgaggtcagaagtcctcatttacgggggtcgaatacgaatgatctctcctaatttttccttcttccccaactcagatggatgttacatccctgcttaacaacaaaaaaagaccccccgccccgcaaaatccacactgaccaccccctttaacaaaacaaaaccaaaaacaaacaaaaatataagaaagaaacaaaacccaagcccagaaccctgctttcaagaagaagtaaatgggttggccgcttctttgccaggtcctgcgccttgctcctttggttcgttctaaagatagaaattccaggttgctcgtgcctgcttttgacgttgggggttaaaaaatgaggttttgctgtctcaacaagcaaagaaaatcctatttcctttaagcttcactcgttctcattctcttccagaaacgcctgccccacctctccaaaccgagagaaaaaacgaaatgcggataaaaacgcaccctagcagcagtcctttatacgacacccccgggaggcctgcggggtcggatgattcaagctcacggggacgagcaggagcgctctcgacttttctagagcctcagcgtcctaggactcacctttccctgatcctgcaccgtccctctcctggccccagactctccctcccactgttcacgaagcccaggtgggccgtcggccggggagcggagggggcgcgtggggtgcaggcggcgccaagggcgcgtgcacctgtgggcgcggggcgcgagggcccctcccggcgcgagcgggcgcagttccccggcggcgccgctaggggtctctctcgggtgccgagcggggtgggccggatcagctgactcgcctggctctgagccccgccgccgcgctcgggctccgtcagtttcctcggcagcggtaggcgagagcacgcggaggagcgtgcgcgggggccccgggagacggcggcggtggcggcgcgggcagagcaaggacgcggcggatcccactcgcacagcagcgcactcggtgccccgcgcagggtcgcgatgctgcccggtttggcactgctcctgctggccgcctggacggctcgggcgctggaggtgggtgccgcgcctcggaaggcggggggaggctgcacggtggggacgcgataccccccaagaccttaacccaagtctttaatgcagagaagccgggggtccgtcaatgggacccctctcctctccgcccccgcttgcggacgtccagcgcatccccgctttcggcccagccctgccccagggagtcgcgctccggcccgctgagagggagcgggcgaggcgctggtctccctggttccgcgccagcccggggcgagaagggtagggggcgaccctgagcccagaccccgacttagtccctgccttggaagcgggggtcgggggaggcgagagacattcagacaggggggaagggggaaggagcacgtggggaaaaccgaaaacgcagcgtccctaaagccagtccttcgctcttgaatcgttgccctttcctttctcttgggccctggggaggaggaggaggagtcgggacagcccaggaagctaggagcccctcgcttttccctgcgttctccgcctcgtttcaccttcctctctcacccccatcccccttccttgctccaacctcttttcgcggctgctggcggcggcagcctgggtgcgaccctagcccgagccggcgtcggggtcgcgcaccgccttccacaggcaaactttgtgcatgtccgcgtctcccttttgtgtaacttgcgagaaatgggaggggtcggagacccatagccaccccgcgccttccccaagtctggacgtcccgggagttcgctcgcaccctaagctctgtctgagaggcagaaggtccgcgggaacaaaagccgcgacaccccgccctcgccgtgggccgagccgcgttagtctcagtgcgccaccgaggctcccgcccggctcccttcccggggctgcgcgtccgcctgggagggggcagagacgctgccggggcttctggcggagcctcggggcccctctgcttcccaccctcggatcacctccgaggcttaattctgtgctgggctgtaaagtccttggcggggaggaaataaggcggagagtgggatgtgcgtctggaaagggcagtggcggatggtggggaggcacgggctctgtcctgtgcatccaaggaggcgtttgtctgattaaggcgcggcctcttccctggcagctctggggactctggtttagttcccctgggggcacaggatgctggggagggtccgaagggtcttttttttagggtgcagataaaaggatcgaattgagtgaagattaagacggagaagatggcgcctctgcagtgcagcaaagaaaagctgtgtggaggctgcagcctagtgaaatccacccaccactaggtgtataacaagtcttccccattcatccaactctcgaacattcagctaacgcctgtgcacaatgactgtttttctttacatctgaagatgcttagaagttgtttgcatgacagttgggccagaggaggctgtatttcacttcggacttcggttgggttcctgtttggcatcttaacatttgcaaccttccttacccgtttttcccctcttttcccccagcctcctagtaattttccaaaagaaaaaaagcaatttccgggcagatgttttcctgtaattccactgaggctgtacagactatcacaccattagttttttagtttctaatttgcaaggtcattgaacttttttctcttctgatttttacccacaagtggctcaggaatcaccttagggctagttaagacaggttgttttaagagttaaagaatttcgttttccatgttttaaaaaaatgcacttaactaagagaattctgatttctctcatgacttacttacatttatttgtagaattattccagttttcccgaatggtcttactacagattaaaaaccatacatttaaggaattaaaagcatatgataaccgtatttttgaagcttttgtcaaaacttaaatatgtaactttgttgagcaatatttctttctgtataaaaagaggaagcatgtaggcagattcgaatttagtttttggtctgtttaattgcattaatatgctctttctgccatcttttgggaccttttcagtagctattgttaactcctttaaagggtggaggtgagattcacattatgccattttgcgaagtgttggtagaagggtaggtaattcagtctactgaggtttgagggtggtttatctggttctctctgtgtccactgaaaagatgtaattacgagttgactgtcttttatagagcttagaaaataggtctgctgcaggtggctgtagaaaagaaatgaataagggcaatgataatggggccttggctatcgggggaaacatggttattatctgggttgatgattttggctggtatgttgatagaggtgtgagtttaacaaaccctaatctatatgatgtttcactaccctaatatttatttatttatttatttttaaatctagcttcctcttaagttttatttccctctgttgagggtttaacctagtcacaatcatcttacctttgtggtagtgctaatttatagtttatggaaacctgctgctactgactagtacctcgctaaaggtagaagccgacacacagaatagtaaagctcaggtttgatggtgatctgtaaggagtcacggttcttgctaatcgatgagaaaccatgataactggcagactgcagaagcttttctcttgtcaccggaaccagcagaggctcctgaacgacatttgcaaggctattagtactgcggagaagttactagatggaataatactggtcctgactgaggaaatgaaaaggaacatgcaagttcacgaggttaaatgaggaatggctgattcaaaaaaattaaaaagaaataacgtgatcaacaatattggtttgaaggaatgggagaggttgtctttatgttaagtcttgttgctagaggatctctattttatgttactgttttttgcatactagagtcttctacagatatttgtatgaatgttgtcagtcattctggaaataagcatagctattacttgcatttcacgtggccactaaactatcagtgagaagtgcattaaattcagtagaaatgtacattgtttctgcaaattgtattaccttgagaatcttacaaagcatctttcattaatacatttcttttaaaatctctatcaattacaaatgtaaagataaacctgtacagatgcattttaaatttaaagcttccagaatgtaaggtttagttcgactgcatacctcattacctccccttccctcctccctccccttactcccaggaagtttgcagggtaaataaaacatgcacatgataataaaacaaagtggaatgtactaaaataccaaaaggaaaatacagattaggtatactgagtaaatatgttacagagaaaacttcctgtatttaaaaagtaaggaacaatgggatgagatcatagataatcctggagcatttcctggtagtaaatttccagccaggtttatatcccaggtctggggattggaggttaagtttctgcatatacaatatttgtttacattcctctctgcctctaccagacagacagacagacacacacacacacacacacacacaccctctgtctctttctctctctttctctctctctctctctctctctctctctctctcacttgagtgacagatgctggtgcagggtattctcaacaggagtagggaatttgaaataaggagttgagaggtcaaaggtaaggggctgaatgcaggaccagagagcttcagtagcatcttgatgggcagagtatgagatgaacagtggcaacgaggaggatagggaaaaatcacattttctgtttgtgttttgtttttgtctggtggttttcaacctctctctgtttcacttgactatgcttgattatgaaatcttttttttttctttttttaatttaaagatctcaactggctttgttgtgattctacattcaggcaacactattctgtaaaatagtataaatgttccgatgagttgaacagaggagattggctttgtagacagaaaagggctgaagaaaacagaaataaaaaaatcttttccttttcatagtgagagctcagatgcaaatgtatggagtggggatggatgggaaatgccgtcttttgcaaacccttggaaacgctgtcaccctgtgggtctcacagccagtgtacagataacaccctcatctgtacacagaagacagaaggtggcaggggaaggaatgagcacaccccagaatgagtagcaagtttaatcaataaaatatgtatttctttttttattgttgtataagaagaaaagcagacagaactcaaaccctgaagctgattttgcaagtgaaaagcttagtaaagggggaaatgttatgtaactattttttcagtttagtgtggatggcttaagaaataatcattactgtgaggacactagtatttttcttggaaaaaaaagtttggcaaattttcctctttagattaatcttggttatagattattattatgcttgagtggtacctcttcagaagtagaaatctggcaaaaactggagtacaatgattgctctaggaataaattcacatatttaaatttaaaagcctggatatgtgcatcaattaatagctttatgaaacagggatgcttagtagattagctagctgagtattcagagagggccacagaagtctcaggttcacatgtattaaatctgctgaaatagaaacctaagagatcattttatttaggtttattttgtgtggctacatgttgaagaaacatgcaatagagatttagcttgaaccttgcgagactcacagtatcttacgaaagaagatagttaaaatggggaagatgagaggtttttaaaaatgtcacctctgtagaacgaaccagagttgttctcaatttataatgttgaatttgatgccaggcgtgatgttaggccaataacactgagtcattgagtgtttctcaggtatgtagagaaggcagcattgcacactaatcaggagagtttagaccagggcaggaatgcatgggcataaattctgtctttgtttcttttgagctagtgaccatgggcaagtttctgtgcctcagttttttcctttgtaaaatgggatgagtacttctagttattgaggatcgaattaatatctttgttaaatgcttgaaacagtgtgtgagttaatatatatgtaacctgatggcatagcataagcactgtgtgttagttgctgctatgtatggtgatgatgttgatgtacaatgggtatatgtaagtttcctgcatagttgaaagttaaaaatctagatgatgtttcacttattgacaaattacttattggccaattaagactattgcaggaaattgacagattgttgtctatgagtttgatctaaatttaaaaagcacatggtatctcagatacaatttttagaatacatgttataaaatttcatttattaaatatgtattgtgtatttcaattggttttttgaaaaatgaaaataattcatgctcattgaaaaatttaaaacagtacagaaatgtgcaaaaagcataagcattttttacacaaatgggaaatacctagtttttttttttctttttttccacataacatggatgtagaccttttttttttttttttgagacagaatctccctctgtcacccaggctggagtgcagtggcgcgatctcggctcactgcaacctccgcctcctgggttcaagcgattctcctgcctcagcctcctgagtagctgggactatgggcactcgccaccatgcccagctaatttttgtattttttaagtagagatggggtttcaccatgttggccaggctggtctcaaactcctgacctcaagtgatctgcccacctcggcctcccagagacctattttttaatgttgtacacactggcagcttgccacagatgtctaatattgagcaagtttatacactggcttgattattaactattagttggctatcagctatgtgcaaggaactgtgaacagacttggtttagttttcagtagaatctttgctagcaaaacgaataaacaggctttgccaatctgggtagaaatggaagatttcaaatgccagcaaaagaattttggtcctaatatggaagcttgaagttatgttcacccaaggacagggaaaccaaaaagcagattgcttgagaatgcggcatttctctaggaaatcagtttcaaaataaaatgaattttttgttttgttttgtttttgagacggagtctcgccctgtcgcccaagctggaatgcagtggtgcgatctcagctcactgcaatctccgcctctcaggttcaagcgattctcctgcctcagcctcccgagtagctgggattacaggcgtgtgccactatgcccagctaatttttatatttttagtagagacggggtttcactatgttggtcaggctggtctcaaactcttgacctcgtgatccgcctgcctcggcctcccaaagtgctgcgattacaggcgtgagccaccgcgcccagctgcagtaaagtgaatttgtgtaaccagccatgttatggctgttacatctttaaaactttatagtgatctgctgtttaattgaaattatatattttttttaaaaatcagcatatgttgctcaaaaataaaaggtttttagcttcaaaagcaggccaaggatatttgaaagccttgagtgtatgaaactggtgatactgtggttaaatgatgatgaacgcagggaaaaatcaagaagcagagtcccaaagaattcacatgggtttttgttaaccagctcatgtaattataattgtcctgtccaactaaagacaagaagacaagaagtgggttcacatacgaggatgtgtaatgacagaagccatatttgtgataaacatcctgattacagtagatacagtgaggagtgattaagatggttccagaagcaggagtggagggttcatgagcagggatgaggaataaataggacaaacattttggaaaagggaaaagatgaataagcctgttttgtaaattaatggatcctgatgaatgaagtgcagtgattccttaaggtcttattaatgatggaccccaaacagtgtttgaatctcttaatttccagatggttcctttttttcttcacaaagtcagaaggttttcttatgagaaatttgattcaacaagaataattgtcacttcttttgttttttggtgatttttttttttttttttttttttttttttgagactgagttttactgtgtcacccaggctggagtgcagtggcgtgtcttggcttactgcaacctctgcctcccgggttcaagcaattctcatgcctcagcctcctgaatagctgggtttacaggcatgtgccaccacgcctggctaatttttgtttttgttttttttttttttagtagagacagggtttcactacattggccagggtggtctcgaactcctgacttcaagtgatccacccacctaggcctcccaaagtgctgggataacaggtgtgagccactgcacctggccaattttttggtgattttgataggaatttttttttttgcctgatgctttttttgagagaatctaataatttgtctcttatttaataatttggctttcattagcttccagaaagccacatactgtcttcattgaaaaatgtaaggcatcctagatgatacagactgataaattacttttcagccataaaagatacttatgagaataagagatctgttgcataaagaaaagtcatttgtgttaagtgaagaaatgcattattactcttgctgctttgctaaatttcaaacattgaataactaatatattttgaccccctggagatattttacaggaagaaaaatgagaggtttaatcctactgttgagatagacttaacgtgttttagacctgcccctcatcccaagttactacaaactcatttgtttagtttttccttgtctgtgtgctcgttatttcacagtaaaattagtgaggcaacataaattttatttttaagagaaagtaaagaaaatggctttatccattaaaggtttattcatcttaaaaaaggacttgttatatctactcctactattggatgaattttcaaaagcatattgatactgtgtttggttttgtttgttttcgggacaagtcctcactctgtcacccaggctgaagtgcagtggtgtgatctgtagccgtggcctcctgggctgaagccatcttcctgccccagcctccagagtagctgggactacaggcatgtgccaccacatctgactaatttcttaaatgttttgtagagatggggtccccactatgttgcccaggctgatcttgaactcctgggctcaagcgatcctcctgcctcgaccttccaaagtgctagattacaggtgtgagctattgtgcctggccaatgttgtttttataaatatcattactcagttattttgtttataattgaattgataggctcatagaataaagatggataagcactgtttcttaactgtatttattgatttttttatctttcaaaaaaaaaatcctcatctacttcaaagattaagcctttaaaaccgatgcaaagtttttgaagtcttagcttaagtcttcagagactaacattaaaacccatcatatgaaaagtgatatgtagtagcaaatattctccatcctgatgctctcaattgcttattatggtttaacacaaatataattttgtcattacagtaaattagtttgaggatataactgaagagtacctaagaaactcccatagaaatgtgaaaatatgcagactaattattctaagaataattaatcatagatacttacatattaaattgattagcaatttaaaattaaagccaaatttctgtggaaattagcttattttcatacacaaagaaacctagattcttaggggtacaaccaagaaagggccactccttcatttcacaaatattttcgaggtccttgcccccaagagggtagacagaataaaaaggaggaaggaagtgacttggaaaaaattaagttgggtaaggaatataagagaatgctacgtagaaggatgtgtgttgtgaatgcaatagtttctgtagtattgtcaaagttctctgatcatttcagtatgtgaaggtaaacttagataactgggggaaggaactatatatttactacattgtaaaagaataattgtagacagaagatctactttgggtgattaaatgttgaaaacaagtggtgggagagagaagttagtgttgattgtgatcacacacttttctatacagtaatttgtttgatcactcatgataatgccttacattttgtatgtactaaataaatgagttctctagaaattctatgttgtggtgataaagaattacgttcagattgaagattcgaacagctgtgcaaccttctcaacatttaagaaactgcgaacaagcatagaaagaagattaaagccttttaaataagattcttttttttcagcctctttttggaacattttattgtgaaaaggtttcataaatactgtcaatacatcacgttcagtcatttgcaattgtatttcaaaaattcagttggcctgcaaaaagaaaaaatgcctcatttttgaaatatttcatccatgccctgattgattgggacactttcaatagagggtgcctagacataattttgtgtgaagaagttagtagagtttggaaagaaaatgtgtattggaattaaatttagtggcatgaaaatgaaaatttctctgtcattgtctttttttttggctccttttttggccattttacagctagtgtttagtgtgacaaggatcaaaattggccctttaaaaaaatatattgaattctattacctctgttatctaaaagaattgtatttttcaatttgaagagcttgaagccaatactactatataccattaacttgacaggaattgaaaatctaattgaggtcattatgattagccttgtatcttgctagtattttctcaatcttattttgaatgttttgtgtcaagtgttaaatcctcttataccacagaatccagaaaatttaaatgcaacagaagtaaaacgaatataaaaattctatggttgttgtggaggggcgttcttggctaacccatagggtgtttgaatgtaaaggcagcttacagaactgctgctagttgaattgtggagggtttcacttttaagagtacatttgagacaaaattgcaattttggaatcacttattcctgcttgttcagtgaaataggagaggggggaattcctgagggaagctgggagatttccaggtgatgatagagtagccatgtgagtatttggctgaaacagagtagaagccacctctgtctgttggacagaggtggccttaacactgagtatcaatcagcatggccattagagctgtccaggacaaacataatgaatgttgtggtggcagagagggtatacttaaatgaacaaaattggaggctgactttccttgtttcttggtagttcctttcttcgtatttgctatttggatatttcacttcacttttgtgagctagactcaaaggttaaatttatatcattgtgaattttctgggtcatattgtagggacacagatgggaagcatcccttcagtttattgagagtatttcttatgcgcatgtgtttttaattgtatttattgatttaataaatagccgatgagatgagaaaaaaatattagtgtcttgttgttgcagagaaaaagacattggatgcattcttagaatttattatcacatgcgaagttatttagatttacaaagcaatctgacatgttgacttcattgctcgtttgctcatttctatcagaggttgaacacaaagccaagcctaagcccgtgattcttctgtgtgcagatgagggggaaggtttaatgcagaatgtttagctgaatatttggattgtgcattccccttttatgtctctactgcaagttttctcagggcatttgtgattgacttctgtgatgttgacatttatttggagttagatgtttaaaaaattactaatttatggcctggtgcggtggcttacacctgtaatcccagcactttgggaggccaaggcgggtggatcacgaggtcaggagatccagtccatcctggctaacatggtgaaaccctgtctccactaaaaatacaacaaattaaccgggcgtggtgacaggcacctgtagtcccagctactcgggaggctgaggcaggagaatggtgtgaacctgggaggcagagcttgcagtgagccatcgtgccactgcactccagcctaggcaacagagcgagactccgtctcaaaaaaaaaaaaaatttactatcttattgtttctctcattttgaatttgtgaaattattattcattttatggacatactgcatggattctgtgtttcagttatgacaggagatctagaatctgggtggggctgtgagtaaatagaaaggtaactcagtctgtgccttgaggaattccgcagtccagtggaggaagaaagagacggagaaataattaggtacagtgtgccaaaggctataatagaggaggtacaaactcttcccagagaaggcaggcagaatttgaactaggtttcaaggatgtgtgaaggtgaactggggtggggagggcttcccagacagaaaaaacagcgagggtgtagagtttcaaagggggaagcccaggggtataataagtgaaggagacagtgtgaaattataaattttggatgcccttaatgagtttgaacttcattttcttagaaatggagtacttttaaatgttcctaaaatggggacgaggcattgatattcatggttcagttaggtttaggagcttttgtagaagtccttttcaaggtctgcttaatctcatgggccagatagtgacacctcgatgcaagggagcatgtaaatgtgctctattagctgggagcattgctatcagaaattacatttccggctctcttcttaagggtaaaggagaggtaggatattgagtggcaactggcattctgggatgtagaagaaatacagtaccataaagggatagaggaaaatgggtagacttaacgttctgaaccaaagctaagattctccgtgagcgattagagtaggcttttgggatttgcttaccttctcttatctgctagccagccacacaggaagcacatctttgtggagtgacagaggaggaggtaggaaatgctttctcatttttatggtagaaacatccaagagctgagccttcattctggctgagagaactctagatggttcagacttgcattcctgggaaggccttccagctagagtgatggaacaaagcaatgatttctgtggccctgtgtggacagcagtggcagtcagtttactctccctgttggttaactgtctttcgtttgatctagagacttcctcaaaacaattttgttgtgcttgttctttgaaagcaacagcagacaaaacaagctttgaggtttttagaaaagagcttgacactgagcacctcttttgagctagatctgtctgtcatgctgaacctgttttctgtggctgcgtagcttttcaaatctgtttatgcttgctggtgttattgaaacagaatgggaagatctatgcaaaaaggaacattgatcttaataaatttatgtcagtaagaatgggactgccattttaaaatttattttaattccttacctattttcttgttcaattattctaaaagtgattaaatgaagatacgtcacagaaagtatgctttgaaatcaagatgtggggaaaacctgtagttctgagtaggcctgatagaatcatcattgttagagtatttggaggttttgtagtagggattttgtcttcacttaaatatttagttgaaatatgttccaatagtttgacacattacagaatctgtctgaaagaaatgtctaaaatatgattcctcagaagctgctcttggttttactttctgctgttggttttactttctaacatttcattttgatcccgcagttttaagagtaatcaaaaaggccgggcacggtggctcacacctgtaatcccagcacttcgggagactgaggtgggtggatcacttgaggtcaggagttcaaggccagcctggccaacatggtgaaaccccgtctctacaaaaaatacaaaaatcagccgagcgtggtggtgcatgcctgtagtctcagttactcgggaggctgagacaggagaatcccttgaacccaggaggcggaggttgcagtgagccgagatcataccactgcattccagcctgggcaacagagccagactctgtctcaaaaaaaaagagtaatcaaaaagctacattatttaaatcttggcatgtctttaaaaaatgttaaactgtcaggaaaattatcacttctggataccaccttcagaaaaacacatgaaaatttgtgcatgtctcaaatagttgttaatttatgaaaaattagaaagagtgtttgaatgtatatttctgtcatattatattgctcatatttttaaattatactttttttcacccgtgaagcccatatagttaagtttgaaaattttaattatattagaatttgaaaattaaataaatctcctttaattcatgcataattttctaatagtcatatagtttgtattatataatttgagaaacttggttctaaaaaaattgtctgccaaagaatgtatatttctgaattctgttctgctttcatacatctgaaaatatttgagctatcataactggctatgcttcaaacccagtctgaaatgggtgacctttgctggctttggattgcagagctgggggctgttgtttgctttatctgatttaaaatagtcagtagtttattttgcaggcagttagatgtatacctttgcataaaatcattgaactgaaaaggttggcactccaagaatacgttgtgagaaaagagaacttgagtactcactctcgactcacctgaatcttattaatattttattgattaatatctgttgtatttttaagtaaataagctctctagaaactatctctgcttctttgttcatttaaaatatattaaacaaattgatacagattgcaaaaattagttgcaacgttcctagttagatatcaatgaaataaaaatggtctattcatacgagttcattttagttattcctactaatatcaaatgtgttttaaaaaatgggagattataatctttttatgaagtaagataaattattactttgtatatttaattcaaagaaaacaaaaaggccacaagtgcctgcataaaggcacatccacttaggattattgttaaggcctacagttgataattaggattcaggcatagcataaatgaagtggtatctttttttttttttttttttttgagacgaagtctcgctctgttgtccaggctggagtgcagtggcacggtctcggctcactgcaagctctgcctccctcctgggttcacgccattctcctccctcagcctcccgagtagctgggactacaggcttccgccaccactcccagctacgtttttttgtatttttggtagagacagggtttcaccatgttagccaggatggtcttgatctcctgacctcatgatccacccgtctcggcctcccaaagtgctgggattacaggcatgagccaccgcgcccagccagatatcaattatttttagacccaatgatatttgctgttgatttattgttggtgcacaaaataagaaaacaaaagcatggttttaaaacagccctttacacatttaatatggaaatggtaacctacaggtctgtattccatacagattcctgggctcattttatctgtgaattcctctgggcgtcatgcatgcccaggactgactttaaagcagaattatccagtagaggtataataggaccgttagatctaatttaaagttttcaagtagccacataaaaaaataagcaggcgaaattaattttagtctgtcactaaattcaaaatgttatttcaacagggggtcaatataaaagctatttatgaaatacattattttttcatattatgtcttcaaaatgttcacatttcacatatttattttttattttattattactatttttttgagacggagtctcactcagtcggttgcccaggctagagtgcaatctagcttgctcattgcaatcttggctcattgcaacctccacctcctgggttcaagcagttttcctgcctcagcctcctgagtagctgggattacaggcgtgtgccatcacacccagctaatttttttatttttggtagggatgagatttcaccatgttggccaggctggtcttgaactcctgacctcaagtgacttgccgctttggcctcccaaagtgccgggattacagttgtgagccaccgcacctgattacatatttcacatattttaattcagaccagctgcatgtcaagtacttagtagccacagatggctagtggttactgtattggacagtgcagctctaggagagtctcttcaacctgcagctgtctaggaagagaatcatagtttctggaacaggtagaatctataagacctcctttttaagcttctccactttacagatgaagaaagtaatatctggagatgttgagttgttcaaaatcacccacattttaaggatcaagagcccagtccctgttctctaacttctaatctctttcttcatcactttttctgcttcatgttgctgcatcccctttagttactaaggtactaacgttaggttgttgctatcagttaaatattaagccaggagctttaagacaatctggcccacttgaaggcatggcctgatttggacaaaacttgtggggtaggatgaatagagttaccaggcatatcttcaacctctctgtggactagtattatacatatatgagatgatgtagggtccagtgatcagttcatctttttctattgtgagcactgttggaataggaatggggggaccttttgggacccaggatatgtgattctgaaccctgaaatgtcagatgcccactaaaaggaaggggagagatggacctgtcattaccttacacattttattgtctgtatgggtatgtaaacatgtacagattataaggaattgcacttcatttctgggcttctggaaacacaggtattaagatttcatttacctccccttgttttggaaggcttattgtgtgtgtgcccatagttcttacccagttacacttaaagtatgatactttttgacagcttaagcctattgcattcctggcatgtaaaatagttattttcagaatgtaagcaaatgtggaaagcttactgcctgacatggagggttggagaagtgggattggtgttcttttgttgtaaactcatttttgtgaaatatttgctttacaacgtgaagcatgcatgatggatgaacttttagaattgaaagttatttttcatttcattcctgaaatatttaccagcatggatgttgactgagtgctttgaagagtttgcttagtcatataacttaggttttatgattttagatttaattaaacttaaagttttcctgtttgatcctcaggacttctcatctgtggcaaggctttactcacaaaggaaatatcaaccttgaagttaagcatgccctgtgtttctttatattctgatgaaaacgattgaagtttgccagtgctgtgtctgggacaatgcttagaggattcatggcttgtaggaatgagttaaaagtacaaggatattggctggcatggtgactgtcgcctgtagtcccaaaactttgagagtctgaggtcagaggattgcttgagctcaggagtttgagacaagcctgggcagcataaggagatcccatctctatgttttttaaaaaagtgaaaaacaacaacaacaacaaggtacaggggtatctgcgtttccttaggcagctgtcttatatacctttaaccttaaaaaaatccaccatttttaaaacagtgttttctgttgtttttcttagtaaatataaacaataggaactgaagtttagggcttaaaatttttgagagaataatttttatttcagtagcttttggggtacaagtggtttcttgttacttagttgaattacgtagtggtgaattctgagattttagtgcacttaagtagggtaccttgtacctaatgtctagtttttcttttaatccctagtcccctattaccctcctcctcgtgagtctctaaagtccaatatgtccctctgtgtgcctttgcttattcctaacttagttcccacttataagagagaacatacggtttttggttttccaattcctgaattactttacttagaataatggcctccagctctatccaagttgttgcaaaagacattattttgttccttgtaatggctgagtagtagtccctgatatatatatgccacatcttctttatcctctcattagtcagtggccacttaggttggttctgcatctttgcatttgtgaattgtggtcctgtaaacatatgtgtacaagtgtctttttcatacaatgacttcttttcctccgggtagatacccagtattaagattgctggatcaaatggtagatctacttttaactctttaggaaatctccataatgttttccatagaggtggtactagtttacattctgagagaataatttttgtaaaattatgtttaagctagatttggaattgggaaagaattacattctttataggaagcttttgaaaaatatatttaaaaatatataaaaatatgcataatcctaccacccacaaatgtctgtattattatgtcatttctaaaccatttttgagattatgctatagattacgttttagatcctacattttatttcttaacattaaatctcatactattttaagttctttgtacatgtaatgtttactgaatgggtaaatctgtttagggaaactggagctatgtagttgtggacttgtgcttttgttttgttttgttttgtttgtttgtacatttgctttttagaaatgtctattcagatccttggcccatttttttttttttttttttttttgagatggagtcttgctctgtcgcccagactggagtgcagtggcgcgatctcggctcactgcaagctccgcctcccgggttcacgccattctcccgcctcagcctcccgagtagctgggactacgggcgcccgccaccacgcccggctaattttgtttttgttttgtatttttagtagagatagggtttcaccatgttggccaggatggtcttgatctcctgacctcgtgatccccccgcctcggcctcccaaagtgctgggattacaggcgtgagccaccgtgcccagacagacatgtgcttttttatttggcatttctagcctgaacataggctggaagtagtgacttagagagggattgtttgccaaatatcaggtaatattttaattatttattatttattgtaatgctgtgaatcaggagtccctaacccctgggccatggactggtaccggtctgtggcgtgttaggagctttgctgcacagcagtaggtgagcaatgggtgagtgagtgttgctgcctgagccctgcctcttgtcacatcagcagggcattagatgctcataggagcgcaaaccctattgtgaaccgcatgtaagaaagtgagagctgcgttgcacactccttattagaatctaatgcctgatgatctgaggtggagcagtttcatcccgaaaccaaaccacaaaattgtctttcatcaaaccattccctggtgccagaaaggctggggaccactgctataaattgctgctgtcaagtagtgttacgcatggtggtctttaacataaaaaaaaaaggtaatgaacgtacaccacacagattagcaaaaataaggaaaggctgatctagtagttcaaacaagcaatcctcttatttaatggttctgtgattgctcgtgtaggcagaagcttaactgtaagttgttgcatttgacaggcaaatgtagctggagctggaatgtagatattagtgaaattgtgatttcagtttactggagccattcagtgggagcatgaagtgggttacatgattacacggatataaataaagcgtcctccttgccacttcactgctgttaaagtctctcctgatgttatgtggtgaaaaacaagtcaaaaacattaattctgtcaagtttccaaagatataagaatctttgaccagaaaagagacggtatttatcttcaaatttaacaaattgtgatgaaatgctgctgttacagaacctagtgtaaggtcgtggagtccattcagccagacacatgtaattttgattattaactgccgtttctgtggtcagtcggccagttttatatatttcacattataggtatttggagcaaagacagtgttgtttattgtttactttaaaaaaatacaatactgtaactacataatgagtaaatgttgatactgttgaaaactaataaaaacaaattcttacactatcaacatcacagaaattctaattgtaagaaaatattgatataatatggaaatccgttcatttatttggtgcattaattgaacaccaacactatgccaagcattgggatacaaccatgaaagaggccagcttcctgatctcacagagcttgtactttgttgggtggggcagagagcaaatcagtcaatctgtctgtctgtctgtctatctatctgtctatctatctgtctatctagatgtcaatcagtatactctgtgccacttggtggtcagtgctatgaagaaaaattaagccagtgaggagctggatagagacacagtctggaagggtatgaaggggatcagaatatgctacccccaaatatgccatttcagcaaagtactaatttgagctgaagacaatcgagaaatagcagacccaggacaagctttaccccctttttataaaaattttgctgtgtgaaggtatcctccttcccctctccatccctggagagaccactagaggtggcaccatcgcctgcagaaacaaaccttattgaaataacccttatcttctattagtttcccccatatatttaccttaccacacttcccctggaagccctaatcccctctcctttgtcttgtgacttctccacagtttattgctctttgttaaaatggtgtgtatgctctcaggcctaactgcttcttttgggtttttgcttttctgtggagctccctcctctcccctccctcatgtaaaaataataacattaaataaaatttgtgttttttcccctgcgaatctgtctcgtcagtttaattggcaaggcctcatgtgctgaacctaacagggtagagaaaaaaggtttttttccccttttctacaagtattaaacctggagagaacaatacagtgtaaaggctgtgaggtgggagcatgctggggtgttggaagaagcacatgagcttacaaacattccatcaatttgcattcattccaaaaattgtatgcaatttttcagtgacgattcccattgatcaatcatttataaaaactaatggtgagggtcttccatactcagtttactcccttcttggaaaagaatgtacattttaatcaagatgatttcatgaaagacattctgtactccaaacatttaaaagagcgtttagagtatacagcaattcatcttttcttctgtattttaaaatttaagacagggagaattattgtattatacttagttcagatttggtggtggttttgttttttggttccagtgaaaagaaattgcatcagtaacctggcggtcaaccgtgccatattgtttgtgatttattagtctggaaaaaataactgtatttctggcatatgtaaaaatagtttgctgagaggcctccttggttgtggcaatagtaatactaattaccaggtactgtatgtagctcattctatgaaccaggccttgttgaaaagtgctttcacttaattttttcttttcagcagcctgtgaggtacctactgttatccccagctgggagggagctggccagtggactgggtttaaactatgttttcattgtctttactcttaaccacttatcttctctgcctccagcaaaataagtcaaagagttcagccagtgtttcttcttggactaagcagtcagcctcctaagtaagcaagccttggaatgcaattgattggtaagatactaaagtaatcagtaaggccctcagttcctggctgccagcttctttcaccctctcctgcaggaagttctgaatgctgatatctctacttggtgtcttctctccccctcccaattccattatttccctttttctcaatcccaagtgaaggaagttctgagtgtggatgttggagtcattcagaccttggatctgagtcacaactctttcaatttactagaaatatgactgcaagaaaatgatgtaagcttccctaaaccaatttccacatctacaaagtatctaaatagattgcttaggagaaaaattgaattaaattgaataaagtgcaaagcacagaacatggccaggagtaggccctggatgaatgagggaaaaatggttctgatttttatttttgagcctctttgtaacatttgttggccccttcagaataatccttagagttcatatcagccacccttcatccctcctgggatgggccaggggagaggcccagttgcctgtgacactgcttcgtttcacatttcactgctttagcatctcaacatttcattgataacatttttgatgcctgaaaacagaataacttatttgtaattctacatacattttgtttgtgatcaagttgttagagtttgaaatgagcctcatttccttgggttttgtccctccccatctgaccttcctcttctcagtgaaccctgaagaaaaaacactagcaaaggaatctcaagaatgttggttcgggacacagctctctccatctactctcctgccctagtcctgcccctccttgtgttttcagcggtgaccaggcactggtgacagccttggctgcttggaccagctggaggtagctgcaaaatgcctgcctgctagctttgaaaaatctctgccaacctcattgaaataattgtttaccacatatcagaggggactgggaagtgggtaattgagagatctttttgaaggggtttgtggcttctccacttgcagaggcttcctgaaatggtgggtaatgctcatgcctcagggagaatcaatatccttctcctaaaacctgctcacacgtagctctaagtattagacatgcatttttgttaacattttatcagtgcatttttctacctgtgtcatttggaccttagattcgggagaaaatcactgtgtatctttggtggtttcaggtggctcttaaatttcattaattcacaaaatctgaattgaatggaatagtctgttttgggaggtttttttgggggggttggggagggattggatttttcagtccttccaagagacttcaggttttttttttgatgttctgattagcccggtgtgtgtaaggccctatcaggtgttcgcctgtgtgatcctatcacacccacatcctgtagctgcatccaagtgctttgaggccgacttaatggggattaacttaacagttgctctgtgggaacagatgctctttgccgcttatttctaataaattgattgagccatttaaaagattttttttttcttttaagttacatcttcttaagaaactgtagacaataaagcaaaactaaaatacttgggtctaaaattagtgtattatatttaaaacactgggcttcagactgattatatcatgctcttttactgactttctagtcagatgcttatttataaaaataaagcttatataaagggcagcattcaaatgttacaccagtcggttttagcagtttgaccttccacagtagctaaatattttttacactgagagaagaattctttaacattatatgctatcagcatgtcaagtgaattctgagcttgcatgcaacagatgagaccctaggtggaaacataaaaacataccagtgtgaaagagaaaagcaggctctctgtctttgggaaggagttctgcagggaggggtgtttataagtgtagtagatacttaggaaaattaatacaattattataaaagtcatctgggaaaaaccattaggtaagaatagccaataaaaaaccagaagcaaaatgtaaagatatagaaattaaaactgcacatcccatgcatagataggtcaatggggcaaactggaagtctagaaataaagttgtgcatatattggaaattagtgcaagataaaagtgtctttttacatcagaaaggggaaagatggattatttagttaatggtgttgggttatctgactgtacatagaaggaaggtgggtaattatttacccagtaccaatactggattacctagtattatgtacccagtacagtttgtcagcaacaaaaggcaaacttttttattccatgaagtgttcttacaaatcagtaagaaatactaaatatgaacatcttcagagaaaaatgaacatttttgaaaacttattatgaaaagaattaaacatacacaagagagaatagtgcgctgaatgctcagcaatgatcagctctcacccagtcttgttttatctgtattcccctttctcaacctgctcaattctcttttccctcactgggttattttgaaataatttcaattctataattttatgtataaatatttcagtgtggatgtctaacagaatctctattagacgtggacaaaaaaggcaaagaattttatagtacacaggaaaaaatacacagccaataaacctatgaagatatgctcaatctcatagtcgtcagggaaatgcaaagtaaaacagtgatataacattgttttttaaaaccctgatgggcaaagactaaaaaggcttgccagattggcattttcatctactgtcaattgataacagatatttctttgcttggagtacagtggcacagtctggactcactgcaacctctgcctcccaggttcaagtgattctcctgcctcagcctcccgagtacctgggattacaggtgtgagccaccacgcctggctcattttttgtatttttagtagaagcagggtttcaccatgttggccaggctggtctcgaattcctgacctcaagtgatctgcccactgcaggcatgagccgctgcatgcagctggtacagaaattttttagatcagtcatttagaattttatgtacatatcccttgatctaggaattctagaaactaattagttcatagtatattgtataaatgcgcacagatgaggatattatgagagcattatttgtatcaactaagcaagcctttaaaaaactcttatacagtagaatattatgctgatacattaaaagtgggcataaccatactgatgtatagaaatatctaaaatcataccgatataagtgaaaacattcagaatgcaggcataatcacagattaaacagtaatttatataaaaaacagaaaatttatatgtgtattatgtcagtagcagattcaagtgaatctgacaaaatctgactctgggcaatgagaacattggaatggaggagaaggtagtacatatttactttgtatattatcaccttttgtactatttgagtctttttaactgtacgcagatactttagagcaggggtccccaacacccagccatggacaggtactggtccatggcctgctaggaaccgggccacacagcaggaggtgagtggcaggcaggtgagccagtgagcattactgcctgagtgctgcttcctggcagtagattctcacaggagcacaaaacctattgtgaactaaacatgggagggatccaggttgcctggtccagtccttgtgagaatctaactaatgtctgatgatctgaggtggaagagtttcatcccaaaaccatcccatcccatccagtctcatgccatcccacccccaacaccccatggataaatggtcttccacaaaaccagtccctggtgccaaaaaggttagagatcactgccttagaggctgctccctcttggcacatcttgaatgtaggactccttggttctgccattcctggtaggtagtcagccagcttttgatagttctccccagagacttcatcccacaggcaagccatcccattccacgtaaaacatctctaatgttaggaaggcacgtattttgatgtgatatctagaatcctcccagctgttcttcagaggaacattacttttataaagttgaaaagaacgttttattgtattataaaactaggtcatttcagtgaatttcatctattttcatgggtaactgattcttatatcaaaacttgcttttgaaagtactggaagcataaattattacttcaggcccatttgctttactttgttcagcacattgaacatcaaggagcaactccctcgatctaaaatttctagcattggtgcttgtaatatcatttttcaagttgacattaatgctatctttggaattctcatggtaagtcagaagaaagcagtttagtggaactgttctttctcccactgaattgtatactgagatctgttatattttctgcattttaacccagaaagttgttcaagagaattgaccatgataagacatctgtagcttattttgtatttttttaatggaaaattgtaactgacttttaaatttaagattgagtgtagcctttcccaaaccaatagctaatgtttttataactatttagtgtaggagattataataaaatccacattgcttaagatataaaatgtttgtgcagtaataggctgtataaaaacagtaaattgagattgtatcaggaataatgtattataaaccatatatgaaaccaggtactaacttggtattctgcatagctttatcagaaaggcagagcaaatactatctcaaaatgaagtataaacaaaatgaggttcagtgagtgatgtggtttggctccatccccacctggatctcatcttgaattgtagtccccataatccccatgtgtagtgggagggaccaggtggagataactgaatcatagaggcggtttcccccatcctgttctggtaatagtgagttagttctcacgagaactgatcactttataagggacttttccccccttttgcttggcacttcttcttcctgccaccatgtgaagaaggacgtgtttgcctccccgtctaccctaattgtaaggttcctgaggcctccccagccatgctgaactgtgagtcagttcaacctgtttcttttataaattactgagtcttggatatgtcttcattagcagcgtgagatcagattaatacagggaggctacataatttgacccaagtagcaataaacaataggggtgaggttgaaatccaggcccctggtacttatggccttaagctaagtgaaataagccagacacagaaaaacaaatactgcatgatttcatttatatgtggaacctaaaacactcaaactcatggaaacaagagtagaagggtggtgttaccagggtttggatgtgggggaagtgaggcgatgttggtcaaagggtgcaaacttgcagttatgagattaatacctaatgtacagcctagtgactagttaataatagtgaattgtacacttgaaaacgtctgcgagagtaaatgttaaatattcttaccacacagaacaaaaaaagtaactctgaggtgatggatatgttaattagcttgattgtgataatcatttcacagtgtatacatatatcaaaacatcacgttgtatacattgaatatacataatttttgtcaattatacttcagtaaagctagggaagaataaaagaagtgacctaaccaggacacctatctgtagctctatggtaaagccaaaagggataataacttttgattatcaaaacttcatcatcattattattttttaagactgggtcttgctatgttacttaggctggtctcaaactcctaggctaagtgatcctcctgccttggcctcccgacatattaggattataggcatgagccatcacacccagccagttttgaaggtatctttattacatttttttgtttaaatatttaatagtaagtgtttaacttgaagcatttttttctgccttaaaattgattttcccactcattttatggatcaaaactattatcagattttaattcccactccaccacattgtttataaaagttgacaattatggaaagtaaagtaatactgaatttttctaatgcctatctttgacatggaataaagattataaaatttcttataacttgaatgagtttttaaaaattggacatctttttataaaaatctagcattgaccatttcaacataagttttacttatctctgaaatacaggtagtacctatttttattaattttcttaagtgatgctgagtgacactatttttgttttttttcactttttctttactttttttttgagacaggatctcagtctgctgccaaggctagagtgcagtggtgtggtcttagctcactgcagcctcggcttcctgggctcaagcgatgctgccacctcagcctcctgagtagctgggactacaggtttgcaccaccaggcccagcagttttaaagattttttgtagagatggggtcttgctgtgttgcccagactggtcttgaactcctggcctcaggcgagcctccgacctctatctcccaaagtgctggaattatagacatcaaccaccgtgcctggccccagtgacactgtcttaattttgaatagggaagtatctaatggtattaaaatggtctggcagagaaggggatatgaggcttggtgaaaataagcacaggatgcaccatctttgagtaagtgttagtttctgcagtgagccagcagcaacattcttagcagagcctagaaagatcgagtgagggctgtgtggtggtgcagcctcttaagtctctctggttccacaacatgctcagattggtggctttgatattttctccatccaggacgcattgtgctaagcttagggaaggtccagtggatatttaccaagcctcttatactgccccgcatgttgccatgagacagcagcgttatcaccttaaatggtgcaaatactccttgtgcataccctacccctgagatctaacatctggattctggatactgtttcctattcttccatcttgctgcatggttcccaggttatgtatatagtgtggctaggcaccacacatggccctggctccttgcagccatacagaggtgacctaactggatgtaattgggtatgtaccgggtgttggctacctgtgcaggttgagggccttccacaggtctagcaaagcaattcattgcctttctgaatttttgaatgcttcatttgtgaaacccttgatgtaataactgttgatattatttctttttgaaaactccccttactcttccctgtttcttcatttgtaaactggaaccgatagaaaagtaccaaacttagggttgttgtgaggcgtaaaagaaataatacagcccagagaacatagtatatactcagcaagtatttattaatatgactactaagccagcattggtgattgattggctcatagtgtcttctatttgccagatgttttcagaggctctgttcatgttcatacccatgtttgtaaatgacagaatgtaaatttcttaatcctctgtcttctcctttagcatcagctcttgtccccaaagtaaaagaactcagtcatccagaacccagttttgtagatctatttttcaaaattgggcagttaatagaaaattaaaagcagtctagggaaaagcctttcctttgggtttgttgctttcttttctgtcataataagactgtgcccaaactgtagggaaaaatcaagaaactgtaaaatacatcatcagggtgtttatagtaaatgtaaaacgttaagtaacatttgagttaatctgtgcttgtacaaacctcagaagcttaaataatgaaccaatgacatataatttagaaagttttcattagactctttgcgttggtatttgcaatatcagatttgcatgtcatcattattagccttcctctattttgagtgttgactaggtgccaggcgtcatgttgagaaatttatgtgcttatttaattctcacactgactccatgagatagatactccattttacagatgaggaccccacatcataaccttttggccagaattacagttagtgttagaatttaaacctatgcagtctcattccaaatcctctgtctttactcctccagaatgctccattaaatgaattgtttcttataatccggttgttttaacgttggaaaagaacttgagaacatttagcccaaccaccctatgaagtttggcagtacttcttgccattctttcaatagataatttatttgagtttaagggagagtctatgaattaacactagtaccaaaactcccatgagaaaataatgtagacagcttttgttaaaaaagcagaatttttaaaggtgttcattcagttatcttcttgcctaacaagttcctgtgttgtgatagactttgaatttgttaaatatgaattggcttcctgattctagctgttttgccagaggcctgatttagagaagggattaaaccactggtcaaccttggatggaatttgggccagcagttccttctccacagcccctgacacttggctttgtgccaagaaaatcctacaaaaggaaattgatttactctacccaagacagagttccggaggctttggttgtccattgttagcttagaagttggcgcagtgtgcgtgtgatccacgcctaaatagcacagccttgctgtgcgtggtagaagttgggttagtgttgacatgctgttgactcaccctcccgaggatggaagctctggcctgggtcaagttgtggtcactgcagttaacagtttgttgatctcagggagtattccacagttgctgatgtaattgacaatgattggagccagctcttccccagattcaaatggaccaattagaggacttgttggttctgtttatcaactatgtaagtgagtactgtgaagttggcattgtttttagtctgtatttgggtaagatgaaactctgttctcagacagtaatatctttcaaaagtacaatgttacttattgtgaccaaagtagggatgaagtttgcaaattatttggtgtaatgatttaatttggccatccatgcagtgcagttctctaccagtgtgattgttctctttgtaaaatactcttactttgccagaaaattgtttgtttgtttgtttgtttgtttgtttgtttgtttgttttgagacggagtctcgctctgttgccaggctggagtgcagtggcccgatattggctcactgcatccttcaagcaattctcctccctcagcctcctgagtagctgggactacaggtgtgtgccaccacgtccagctaatttctgtatttttaatagagacgaggtttcatcatgttggccaggatggtcttgatctcttgacctcgtgatctgcctgcctcggcctcctaaagtgctgggatacaggcgtgagccactgagccctgttgaaaattcttattaataagatgtttctcatagaatgtttcaaaaaattgtgactggtttcaaaatcagatgatttgcaagaattagccatagtataaacacatagttctcaaaccgttttctgggagtgggcccagagatctatttaacaaaaccttgagtagagtctggtgcaagttaaaattggagaaccactaatgtaaccttaccttatctgtggaccacattttgagctttggaagaaataaccctttctatccttcacaaggtaacagatgatttttttgcacaattatttgataatgagcttatatttgagattaaggtatgcacacgataatgtacattctcactctaggtctggggaccttgattctttgactcttctgtccttttctctccagttacttggttttgtgcattaacaaacttttcaatttacttatttttttttacttatttacttatttctcatcccttacgtaatgttgcatcattgttttttgtagcctctgcagttcaagatactaatcacccctttctaccacattaaaatacagactctacctaaaatcatgtatgggagtaacttgatatatacgaaagtgtaaccgtgtcacaattccccgccccaccccgccagtctacataaaactgcaaacactttattgcttaccaagaaagtagacaataatatcgaagaaagccctccttttcctcttctttgaccaacaagggagcagttcctgacaaatgtcagtttgctttttgagttccttaggtttctgtgttgtgtttgcaatggataaatattgagtaacaggtactgactgtattgtatacattgaaaactatccaccaacagaatatttgcaggaggattttgttttgttttgttttgttttgttttgttttgttttctgagacaggctatctctctgtcacccaggatggagtgccatggagtcatcatggcttactgtagccttaacctccttgtctcaagcgatcctcccgcctcagcctcctaagtagctaggactacaggagaggaacaccatgcctggctaatttttttttttttttttgtagagacagagtttcgctgtgttggccaggctagtgttgaactcctgggctcaagaaatctcccaaagtgctgggattataggcatcagccactgtgcctggcttgagaatgacattctataagtagtttcagtcccttagtttaatcccatattttgatcctataacatgtacaatatttgtgtatagtatatgatctgccaactctctaagaagattttaaaacttattatgttaaatttcagacatatacatcatccagcttcaaaaattgaccacattttgctgttcttgtttcagcacctccccctgccccattttcttttctgaagcattttaaaataattctcaggtatcatatcattttacttctgttcataggtttctgaaaggatttgatgcagaatgttattattaaaccagtatacagagagaaaggccactggatattagtacatgttttggtttcagacggtccttttaagagtatattaaatcacataaggattttctgagtacccattagaaccacaaaaaatacctatgatacccttcttactgcagtagaagatgagtttcctagggtagccctttgttgatggaacaaacatgtattttgtttcatcaggaaaatcattggaacagccatgactcagatccactaaatgaaggaacaaaaataggacctgcctcacctcctgatttttttttaaatctctaggatgagtaaccagaatatttttatgttgtgctaagtaggtttgtttgtttgttttttactctgacttatattatttgaattgtagaaatatattgtttttacttttttctttaaaattctatctggagtttctaaatgagagattgtagctcctaaaacctttcttagttttggtgtcttgctttctgttcttagcgtctgtggtcatttctaactcccagtgaggaaagagctctctggtcttgtttctttgttaaatgaaggagcaaacctccgtctcgttgatccactcccaacccacttgttttgtaacaatgaaagttatctcatacttaaaagacaacttgaaattataacacacctgtaacaaagtaaagggtatgggtttttacttaggtttaaaaaaagggcagtaacccttttcataaaaaagcaaaatttagatgggatagaacccccgtttatagaaaagattttaaaatctcatttgctctcattgaaaccttaaccttctctcaaatactggcgcacctctgaggaacttcaaatacggtttgaaaactaatggtttaaggagggccaggcgcagtggctcatgcctgtaaccccagcactttgggaggccgaggtgggcggatcacttgatgttagcctgggcaacatggccaaatgctgtctctactgaaaataggaaaaattagctgggtgtggtggcgcatgcctgtagtcccagctactcaggaggcggaggtggaggcgggaggatctcttgaacccaggaggcataggtgcagtgagcagagatggatctcttgaacccaggaggcataggtgcagtgagcagagatcgcgccactgcactccagcctgggtgacattgagactgtctcaaaaaggaagacgaatggtctaaggaaactagtttgtggtttctcagcggagaatgacattctagtttctacagatctggcaacagaagacaggcacataaactggcctgctttggagtcagggccaagacttaaatccagatttaaaaccagctttttttttttcttcttctaaaacaaccaacctgtgttttaggtccagtgtctgccttgtaagttgctcaaagctcagatacaaggaagtaatcagcacacatttttgtgataacattcctgaaaagaaaaagatgaggtggactaaggtaaatacactgctccttaaaaatccatatttttagattatttataaatcaaatgggcatggttaccaaagatgaattctagaggtgtaaaactccagtcttatacctcaaatttcagttttccttagggagcaaaacacttccatgatcttactgaggacctaaaaaagcctgtacatattttaaaaatagcactccctagataaagcctgatggatccagggtacagtagaatcatgaaattgcctgtttctttttaaaagatgtatatgattgctcggtggctgtatattgtccatcgtgtgcgtgcctgtgtggtatgttggttctttcagagaggcagtggcgtgcagagtgagaggatcacagatgtgtatgtgacaaaactatttcttttctttcttttcttttctttctttctttctttctttctttctttcttttctttcttttcttttcttttcttttcttttttcttttttgagacagagtctcactctgttgcccaggctggagtgcaatggtgtgatcttggcttactgcaacctctgcctcctgggttcaagcgattctcctgcctcagcctcctgagtagctggattacaggtgtgcaccacgatgcctggctaatttttgtatttttagtagaggcagggtttcactgtgttgttcaggctggtctcgaacttctgacctcgtgatccgcctgcctcggccacccagcgtgctgggattacaggtgtgagccaccgtgcctggctgacaaaactatttctaaaacacaagtccagatattcctaccaagggctctctggggcttcgttttgatttatatgcaaaacactcctaatgtggtgacattggggagataaagatctgggatgatgagagagaaaggcaggtaggacacatgcccttccagtaactttccagctagggcttgcatttaacctctgatggaggcctcaccatccaggcagatgtacttgcttaggaatgagtttgagataataaggctaaatgtgctgccttctgtatataatttgcatttgtcctaatgtacgactaaggaaatgaaaaatcaaagtttgagtgactaaaataaaagaggtctgtggagtaattggattgaatttgcaccaagtcaaggagaaaacttctgtattttgtatgttttgtcatggttctatgattacttgttagaaagtgatataaaattcaataacttagtttgatatgaacttggctatctttaagttatagaagtcgtgcatataatgtggctgttttcaacccccataccctttctgagtggttggagatgtcttgaatttcgaagtgagaaggtctggtgctgttacatagataatcatgttagccagctttaccttctgataagctctcaatttaagaaagtacttctaatcctggctttatctttggcttgctatcttattatgcacagagcataattgtaagaagggaataatatctcttgctgtctattcactaagaatagtgtgaggacagggctcttaaaaacatgaagagatgggcactattgtatagatatagagatttgatgaaatgttaaaatgttggatgattttaaatgacaagtggagtggtgagaagtttatttttaaccttatgtggataccttggatatttagaaacatcgaagttttaaggaagaacaaatatcttgactccaagaaaatggtcatgtgatactgtggcatctatttggtcttcctgatgtatatgtttcctgacatttagctcctaaaatccttggaatctccagtgctaagaaggtcttatatgctaatgagatgactggtggctgggtaacctaccatgtgattagagggttaggactttcagtcaccctccccaacctccaggagctgaagtttgagttgataaactaatgatcaatgatacctacataatgaagctttcttaacaaccctgaaggaccgcgttctgggaacttccagatagctgaacacatggaggttcctggagggttggatgtcaggaaagggcatggaatctcgttttctcttcagccgcacctcaccccgtgcatctcttccatctggctgttcatctgtgtgtcctttgtaatatcctttaaaataaatgggtgaatgtaagcaagtatttctcttagttctctgaaggtgctccagcaatgaatcaaaacgaagtaaggggtctggggaatggtagccagttggtcagaagcacaggctacaacctggggcttgtgattgacatctgaagttgggggagttttgtggtactgagccctcagcctgtgggatgtgtaatctccaagtacagtgtcagaatccagttgaattagaggacactcagctggcatccattattggcatgcagtattccttgtcatgagcctgggcaacatagggagacctcatctctacaaatatagctgggagtggtggtgtgcacctgtggttccagctactcaggaggctgagtgggaagatcgcttgagtccaggaggcaaacattgcttctcctccaaatgctgtactttaacatgtttggaaactcctgcaaaggaatttcaacataagcgaagtcaatgggttataaaggactgaatgccattttgtaaatgtcagaaatcaaagtcacaaccaagttaagttctagattagggccaggaagagaaatgtattatctggtcaaccatatcaaatctgtattttggtggaagagcattttcttatattggttctgattggtttgatacggacagggaactgttttctttattccagttatttgttttgttttgtttctgagacagagtctcgctctgtcgcccaggctggagtgcagtggtgcgatctcggctcactgcaacctctgcccctcaggttcaagcgattctcctgcctcagcctcccgagtagctgggattacaagcgtgctgtagtttttgtatttttagtagagatgaggtttcaccatcttggccaggctggtcttcaactcctgacctcatgatcccacccgcctcggcctcccaaagtgctgggattacaggcatgagccaccgcgcccggcctattctagttgttaatcagttaacatagccaaaagatatagaataagattgtagactgaatccatagtctaatgatttgtcttcctagtaattgtgaataattcagacattcaaaattagtctggcatcatacaaacattagactagtcctaaaatgaggatattggcaagtgtgttaataaaaattgcatatgcagtattaataggttccttacgtaggctgccgattactcaggaactgtcagatgttttgttttgttttgtctttgagagatggggcagggttttactctgctggagtgcagtggcacaatcttggctgactgcagccttgacctgctgggctcaagcgatcctccctccacagcctcctaagtagctgggactacaggcatgcaccaccatgcccagctaatttttgtatctttttttagagacggggttttgccatgttgcccaggctggtctccaactcctgagctcagggatctacccacccatgcctccctaagtgctgtgattacaggcatgagccactgtgcccagcccccagatttttaatcttctctttgacattgagtttcagaaatgaagtataaatggtgaatttttagtgtagaatatgatgcactaggaagatcacttacccgtttattcactttcttagaccatgtcaacccgattctgaatttagggttctgttgtgatggtgttctttagaagtgattttaacactcaaaatactatagtctgtaacataatttactgattttttaatttttgcaaactaagttgaagtaatcaagtatttatgagttctttgggtgagaccatctgtcaaagaattctgggcttaatggagatacatatatgttgtgaatactaaacagatatccaagtaataaagcagaaatcatatgctgtgtaacagaaatgtaaagttctgaattagttcacgagtaggagagaaacttttttttaaaggtagaggagaactaaaagtaatttcttaaaagagtgcctattttacatcttgaatattaaaagtctaattcagtgccttgggatcttgttctttttgtagattttgatttgaatgaacttcagtttgctgaaatgtctaatgggtgcaaagtacagatttaattataaggttgagctaaaatcagaatttaagcatatggcatatataataccaatttaatctttcccccttaaatttagttatttttagtgagtcccaaacaccatatttgagacatcacttttttcttttttaaagagatagggtctccctatgtgaggctggagtgcagtagctattcacaggctcgatcatagcaaactacagccttgaactcctggccccagtgagtgtaatgtctcaccatgccaaagtacttttatcttaaattgcttatttttttgtttatttttttaactgactctgtttacaaaattaaccttttatctagtgacagctagattgtatcacatttgtcatctatggacaactgatttttagttgtttaatatggtaagtttattattgtttttccttatttaagaaaacaggatctgagtgaaaaaaaaaaaaatcttaattcaactatcacgattccagtaggaagtagacagacattcatctgtatacattaggtgtcaaagtagagttttgtggtttatcattctgaagatttgagattcaagacatgactatctttcagtcatattgtgcaatagataacatataatgtttctcactgatgagaacagttggttagatctctcagatgacttgaattaggtattagttcaagtcagttgtcagtaagtttggctttatcgttcagaggagcttcttatgactggacatttctcaagtattgccgtattggtcatttggctatcaatgcttaaattatactcagtatagtataaattttcttatttcccttatttaagcatgcctccattacactgttgttgtctctaataagagtttaataatctttgttttggcttagtaaaaagagccaacaaatatatgagtgactgactgagtgtattgctctatgcgcaattgtcttaaaggaaaaacgtttatagaatcactgtgaacaataaaatggttgcatttcgctggaaaacctcggtgctcctttggtaaataatgaagtgttttgttttacgggccttttcactacttcattgacaacagacctttttttttaaattaattaattaatttatttatttatttatttattttttgaggtggcgtttcgctcttgttacctgggccggagtgcagtggtgcgatcttggctcaccgcaacctccgcctcctgggttcaagcgattctcctgcctcagcctcctgagtagctgggattacgggtgagtgccaccacgcccagctaattttatatttttagtagagaaggggtttctccatgttggtcaggctggtctcgaactcccgacctcacgtgatccacctgcctcggcctcccaaagtgctgggattacaggcgggagccactgcatctgaccaacaacatatatttatattacccagtaataggcatagtctaaggaagataatagaatttattcttagtagtgaactctttggcttttgaagcagaatttttttttctttgttcttttctgtgatagtaaggaaggaaggaagggaaggctactactaaaaatataaattgctaaatagaagtcaagtctctgggtgttgaagctcacatattggtgctgtccagacctgacgcatctagaaacaggaatttgcccttagcgtaagcttagccaaatggttgagtcatttctaagtattttaacattatagaatgccttaggaaatgtcatgaatatctaaaacaggtcttcttgaggattttattagtttcttaaaacatggaaaggaacttgattctcagtgctggtacctaaaattcaaagacattagttgtgagttgctgtgctcctcagctctaagccacagttgtcatggccaagcctgtctccttatggagagtggccttgctgtttcctgcagagcttctcttgtgcctggcttgtgcctggaagtcagcgtgtcaccacttcagagagacactatagaagcttggtgatcttcaaacaagaacttaaaacaaagaagttttctttcacagatatcttaaaacttgtagctaaataaaacgtgaataactgtgagagcctcattacagcaatttttaaaaaagcagtacatgttttgttgtatcttaaacatcacagaatggtattgtgtgtccagttttgtttgtaaaatgtaaccttcgtgtgaatgaccatctattcctttctttttggaaggttagtttgtcagctgttgtgtgatgctcaacattttatgtaatgacatttagcacaacgtttcaatataacatctcaggaaaacatttaagaaatagtgaagttctctgggtattacattaatcatattaattacctgttgcttttaatttatcaccgtatcaccctaatatcacaaggcatgtgtagtactattttgtaaagattttctaaagaccttccctctataggaaggaaaatttaattcagaaattgggctgaactctctttcacttgtgtgaaaatgggaaaattagaagtaatttgtattttttattgtgaaatcagtgtaggaacctgtgctcgtatcatggaaacaacagcactaatgtttttctcccctcgggtgtgggctttgctgcagatatccatgtcttctactttttctgttcttagttcttattcacttattgtctatacttcgtgtcactttattgaatttcacaaatgcaatttaggaatccagggatgtgataaaatttgtgcatctgcttgtcattagccatctcacgtttatatcgctaagtgaaaatttaacttagtttggaacaaaccaccatgatttagttcacctgtatagtttaaaagacctaagacctgaaatttttttttttttttgaaacggagtctcactctgtcacccaggctggaatacatggtgtgatctcagctcactgcaacctctgcctcccgggttcaagcaattctctgcttcagcctcctgagtagctgggattacaggcagctgccaccacgcatggctaatttttgtatttttagtagagacggggtttcaccatcttggccaggctggtcttgaactcctaacctcatgatccacctgcctcggcttcccaaagtgctgggattacaggcgtgagccatggtgcctgtccaagacctggaattttacactgcattgggaccttataaaattcttgacttgtacccttttggcattttctgaatgctcatgatttgcttctgaaatattttaggcctttggaaacactccttcattctaatcctctcttttcttgctctcaattcttcatgtcatgtaattattttgcctagagccaaatctgatgtgttattataatcatcatttctgcaggagcttggtaacactcctgcttttgttccctttaaggcttcttttggttttgtttattttgtttcactcagaatgatctggttaagttttgcttgatcatccatttcaaatctcttagtacatttttcaaattcagttccaagcatgttaaatgtgtcacaatggaagtggcccacggtcaaatacattttgggaaaccttggttttaaaaaagttaaactgacttcattattacggttttttttttcaaaagcctccagtatccatcttgaatgatccatttcccatatgtgttttatgacagaattctccccactcccaggtaataactgttgacattttctgaaaactgtttttgagaacactgaattagatatgaaatgaggcatttattcatacttcgaaacgaatgtcttaaacctcactgggccattttgagtatacattactagtgatatatttaataacttagtggtataagcatgcaataacaaatttcttacacaagagaagttctgtgtagaaacaaatttaatactgtggctaaagaaatgaaccaaaaaaatttaatatcttgaaatttgcttcttagctctgtttagaatcattgtgattcacggatagtaaattgtcagagtggacttcatgaaccttatatcagacattctgaaaagagctaaaattgccattaaactgcatgagttaaaatatcttagatagtttaaaaatactatgtagacttggtgagtcagatctgccacactgagcgtgtagctggggttgacgacacacgtgttgcagtgtcgttaccagtttgtctcttttagagacaacttggcaggcagacgtcttgcagataaacaaggaaagattgtctattttaaatggcataagacattctttaaaccagtgtgtcatatgtggttatatagtcagcattttctttagtgcaggaaatcctctctcagggttcctgaataaatagcaggtatctttgtagggatagctcgcaggagatttcaaatgctgtgtattcatcagttcaggctccccagatgtcttacgaacgtgctcattttagttttcttttcttttccctcttcctgctagatacaagttgagacaatatgattagctcttaaagtgcttactctccattttatgtatattactgcattttaatcctcataatatcctgtgaggtgggatgttactatgtccatttgagagataaaggaaatcaagaggtaaagttaactggctttctccaaacagctggtaattactaaatacagaattgacttttgccttttgattccaaagatcatattggtactttcatgtgtgggtcccttcagccagttcctacagtgaccctgacccagctgtaagtcccctgaggtctctagagatatagacagtgatggattagaccctgttcatagttgcagatacaagacatagagaggtttctagcaataatttttttagttatatattttcatagggcttttgatttatgtaacctattagtatatatttgttattccagtagagttaatacattattcaaagagattccagtttttaagccttttctccgtttgtctaagttgttcattatgaaatgattggctagaatttgaaagtctttacctacagagagattctgactggcttgcttggtcttggaaccctagttatgagtgcattgtcttgcttcctggtgaactttgcccagaaatagttaccacctcattttttttttttaaatgaaagctggataattaaccctcaagatttcttaattaaaagattactattataaattgacccacagggagttaatacaataaaattatttttgatcattttatatgaaataattatggggcaatcttctgtaatcttgagttgaaggggttatcttgcttaatgttaataacttttgatacaccaactaccttttaaaaattaacgttttttttttttgcttctgtggaagggaggctgtattttgtaggatttacagtttacatagttattgttttatatgatgtcagttggattaattatgttttgagtggaaactctgtttggttcaaccaatatttgaatgctaattttgttctgtgaacaaatagaaatacagagaacagtaagacatgactctttccccctaagtaaaggcttaggttggagttttcaacctgggaattactgacattttgagccaaataattgtttatgttgggtgggggagggcctacagcggaggctgcctgtacattgtaggatgtttagtaacatccctagcttctacctactagatagatgccagtagcaccacccaagtcgtgacaatcatctttgccaagaactttgaacctctacctagaaacagttcatagggctcaaaaagcaaagtggcctaggacccatgtagttaacaagcttaccctgttggagaaccactgcatagctgaacaacatgggtgagactagtgtcagggtaaaggagctcttgactggagattggccgtacacagaaaacaaagtgagtgttatggatatttggggatttaccttcattagggcacagttggttagcgttaggtgtacaccaacattattccctctttagaaacagccatgcacgtaacattttagcacatctgaagaggcacttctattctaattacctaaaattcttattatctagaattacatgctatgaacaacagcagtaaagtcagaagccagaatctatgtgatgttatctgttttgcgatcacagttgtgttcttctcttagtttatttgaacaagtttgtgaaaaaatttttgtgcttatgtaaatactctttgcttagattttttggtagaatgtaaatctttcccacacagtgcaatacccctcctgcccaagggcgagatatagattgtacagtttgttatttctgtgttttagggcttattcctctgtagacatgtcaaaaagacatccgtcgggggtaaggaatgcattagcaattcaagctgataatctgcatggtgagagtccagataattttttccccaggtcacataggcagctctgcacaagtctgttaaacatatgctagttttgaaaattaaaataagttcccatcactcaaggcaatgaaacgtagatgaattgctctgccagattgactcttagaactcctgatgtgatgtggggctagacagaatgggatgtttgctaataaatcagggaggtagtgattgttttccttctttttctcccccacccccgtcaggacaaactcacattctgtagcctggtgcactctaataatgcctgttgaccttggccatgaaagcactctagactcaccccctaaacaccgcaccgaatgtgctcatccttgaaatttacaagccttagaatcttccctacctccactcctgtttactgcctcctgttactcctggtgcttccagtcagaccgtagtcttggctgtgcagtacctttaggagccctcaaaaatgtttaatttcttttaaaatcagaaggaaaaataaagaacaagataataatcatgaatatacaataatgaatccagcctgacttagagttgtctttataccaatcaacagagccctaaaatatagcttttaatgtttttttaagagagaaagaggcccacgaaagttgtcctggggcccccgcatcctcctcatacactggtgggatgctgctcttgcttgctttggaatgtggcagcagctcccagtgacttcacacgtttattacaaattcaaggtcatttggacgctagccttgtgctacctttcatgcttcctgtccgacccatactcagcctgggcatgttttctgctctgatctttggtctgccttccttctccttctccaagtcaaaccagtcactctttcctgagagctcttcggtgtacccttgccagacctctgcattaacactccagcacctttggttagccaatttggccttatttgtgtctccaccattggattatctgtccatcaaggtcaggaatgttttcgggttaccccactgtccccaactttgaatatgttcactgcctggaaaatgtttatctgaatataaggcatcaagccagaacttgcccaaaacttaacctaggactcaaacagctttgaaatcttatctgtgtagagtgggaacggcatgtgtttgataaccatcagcatttgctgttttgcttagccatcaacaatccgtttctatctcttcctcatagtattttcagctgtatttttgtacagcagtcattcacgttaggtgttaggttacactgaaatctctgacaaccagttctgtgctactgaaggcttttagcagcaggattaaaaaaatagttgattgcacattcgaagtctcactgctcacactgtttatgtaattcttggagtccagttagatcatctgatttttaaaatgttgcctgaattacaaaggagttcaggaatgtgttatcaaagaattaggaaattaacattgaaatttattgagcaacatagctaataggttgtcttgctttttaagccttcttgttttctaggaggagcctgaagtccgtggacaagttgaactgtagctggtatttaggaattggtaaagacagaggtgtggatgctatgttttcttttctctgttaggaaattactctcctggtgccacaataaaaaatttcacaggtatctaaagtggaatttattttgtattgttccacacctttgtcaataattacattttctaccttctagtttattactgttattatttttcatgccaggtgtttcttaattgttggcataagtatttattgaatgcttatatgtgggagtgagagagtcaggccagtgctaaagagtagggaataacccctagacagtgaagtaacttttgtcttgtttgcacattaaaaaaaaaaaaagattaggaatccttgctctatatactagaaatgtttgatgttctcttttcttctcttcaaacagagaaaacttagatgaatacttataggctctactgtcaactaactgcaccctcctaatattggcgtctgcatatttttaccattgtcaatatcagattgcctctgatgttgtgtcactgaaactgatagtaacattacatccaagagtaagactgcagtgtgatttttggctcttggtcttctgttctttcggcaacaattttttataaatatagtcaagaaaatagaaataagagtcttcactgctacctccccttcagaattattttctcctagtattgtggttcctgatagcctttattcctatagaaatggcaattcgaaaaattccttctgtgaatctgagggctctacaaagggagagcttctttgatagtgctttggtgtaagttatttaagaaggacaatctacccaggcttatcaagcaaataacctggaatttaaacctggagtattctttagtgttccaagtctgcaggaaaagaagtaatcttggcttaaactaaataagttaacagaatacaatttgaacaatgaacaagaatgctgtttgaaaattatcttgggtttttatgtcaagttaatattctcactgaatttctattatgtttgtaaagcagctttctcctagaccaaaaatcctagtaataaaaccacaacagtatgagagttataagcacacagtaaaggctgatgagtaaatgttatgacactttgaaaggaaataaaccagacgatataatgtaaatatcctttgtgcttatcaaaaataagtgacttcatgttctgttcctgcaatatttctgtaaatctgctaaaaatagaaaggtaaaggtctaagatcataaatctctgatgccctttccttaaaagtaaggaattcttgtcttggattcttatataatatacttatttataatctcacttgttctgattgcaggtggcctcttactatctttacatccatgtgaatgtgtgtgctttgatgtgtacatatgagagacaagaacaaaagtaaatgtcaaatatccgaattcctgtttcagtgagctttcacggagtaaattctttttgtctacttgcctgtgatctcttctaatatgacttgcgttaatgacctttaagaaatcttttaataaaataaaaaattttattaaaatcttttaataaaaaaattttattaaaatcttctaataaaaaattttattaaaatcttcttcatacgtgttacttgaatttactcatggcaaggaccagttagtaccattttatgaaatcacaagctcatgggcttgtgataaaacatataagtgctttaaatttggcattggtaacggcaggccgactcacttgaaaaatgctctgaactgctctgcctcatgctggtgggaagtcagatggaaatgactttctagagagtttagctggcctccaagcttagtgggtactcactctccttatcccccgatagctgctctgagattttaatgcacattgaagacaatatgataacttaacctggaaaattagcattttggtaagggtctttaacttcattagtattttcataccactttggtattagaaattgtaaagatattaaagggtatggacaatgtggaatgtatgtaccagactcagcagtgtatactgactccctcactatagcccagaactggaaatcccgctaactacctctccccatcctagcctgaattgccctctccacctatgttggttttacaatggcctgacgcctgaaagctggtagaaactgtataggaaaatagggttgggataaatttctgggctgacaaaggatagaggaatatgcttctttttccccttgtccaagtatatcagcaactctaagatgcagatttatcagtatggctctactgggcatgttctagttaaatggtagacccactacctcttctggaatcttgttttccattatattcccacctgcagcttttcaaagacttattctcttctctaatggtctcttggttcttttttttgcccatgctctacgttccgagtgggtcaacattgcagtgggtcaatgagaagaaatagaggggaaaaataaaagaaccagaaagaaacctgttaagtttgcacttacttgtgcattaagcatattagcgtaagccttaaactctagaaaactcactgtagtgctgtaaagtaccactgataaagtaaaagttcatttttatgctgtgtcgttatttagtgatgaatatgatattgcataaaagatgaggatctgtaaggccaggcgcggtggctcacgaggtcaggagttcgagatcagcctgaccaacatgatgaaaccccatctctactaaaaatacaaaaattagccgggtgtggtgacgcgcgcctgtaatcccagctactcaggaggctgaggcaggagaatcgcttgaaccagggaagtggaggttgcagtgagctgagatcacgctactgcactccagcctgggcgacagagtgagactccgtctccaaaaaaaaaagatgaggatctgtgtataactgccaggtgttgtgtgaggtaccatgaataacctggcaatatcctaactgtgcaggtatgaggagtgacccccaggaatataattgcaattaaacttgcaaattatgtggggatactctatttcagggcaataaaataaattatgtctagagctcataactcttacacatatttggctaggtctatgcagcaaaacccaggtgataactgaggctttaactttgggatttgtttggtgctgactctgccacatggtgaaatttggtaggatctcagtgcgagtgtcacatgatcagtctgcttgacccaacatgccagaattccatttctcagcccactctcttctctgcatacatacctacctcccggagagggctgggcgggagcctacgtgtggcaagagccctcactgcttttgttacacagatttcaacacatatggcttgatggagtgtgattgcagtagcatgaatgtttggtgatgaaatttgcatgtcctttgctgggagaagtataattataagatttttgtattcacatagccacatgtgaggtatgagcaggaacggggtctatttaatagcattagattgctttcagatttgaaatatttccttttagaaatatattgtgtaaacaaaatatgtttaattttttttaaaaactatgcctttgtacaaattgtttatcatttgcagaggtctaaaaaatgtaggagaaaagaagctcacaaaatcaatcagatctaaagattgcaaagattgattaccatctccttaaaagcttcagtacatgtgtttacagtatcattctatttgcctctgctcagattctttccaattctaggacaacccaaagtgtatagatcataagccataactgatcctaccttacataatacattaaatataaaatatttatggccaggcatggtgaccagttctgtaatcccagcactttaggagaccaaggcaggaggaacacttgaggccaggaagttgagaccagcctcggcaacatactgagaccttgtctctacagaaaaattagccaggtatggtggtatgggcctgtactcccagctgcctaaaaaaaggcaacttgagaaagtttctaccttctgaaacaatctatgccttgattctatcacttagtattttagttattcctatcaaatacatgactgtgttaatttcttttgccacaaaaatgctgcaaagccacaaactcactccaaaatttagtggcttagaacaataaccatttattatagcccacaagctcaagggtcagctgatcccggcttagcttggctacatttgatataaaacagtagaaatttagaaattgaatatatgtagaatatctcttgtaccaaaaatgaagaggaataatagattttgatttttctttgttgtattctgtgctgggtgctaatctgtcctagctgtcagaacaagtagaagccatactggaaaatcatttatttgttactatcaaatttatttcagtgaatgccattcaaaccactctctctgaggagcccagttaccaagtcctccaccttgttagcaacatggacttaaatgcactaattctagaatgagatcttagcaaagtaccagcatttgagatttgtgcaaattgagctcttaaactgtgtgtatatgtgtgtgtgtgtgtgtgtgttcattctagcactcccactacataccatacaagtagctgtatagcaggtatatatacatgtgtatatgtacataggtaggtatatgtcaactgttgaaaaactagaaaatacacattaaataaagtaagggttgataaacattagtagttggaacattgggagatttggacttctactttgcagattcagttggctgcattagatttaaggaaagaactaactttggagaaatttgtgtttgcatttcaggagagatttcttaaagaggaaactaccagaggttagtagatattaacatctagtgatttaaatttgagaaatgcaaattagacatttaagctgtgggtttgcttcccgttttacttgctctaaaagtaatttttttaaaagccagtaacaaagacatgcaaaatagtactgccatgggggaaaaattacttgaaaataatattcaagattgaagaattaaaaaagcttgacatctagtaccaggaatgccagctggcttgttctgtcaaaaagcaagcatgtgctttggaataacactcttgagtagactctaggcgggttttgagcccttctgattatctaaatagatgtggaagtgacttatcttggtttttctgagtcaaatgagataatgagcaaaggccttagtaggtctttgatttttgcctctaaccctttttctatctgcatgttcacaaggtcaaggctgatgagatatggcaatattgagagagtcagaataggataaagatctcaaatactatatatatatttttttttcatttttttttccctttggtgactgtatgagacatgtcagtaaaactttaaagacaggccaggcgttgtggctcatgcgtataatcccagcactttgggaggccgaggcgggcagatcacttgaggtcaggagtggcaacatggcaaaaacccgtctctactaaaaaatacaaaaattagccaggcgtagtggtgcacgcctgtagtcccagctactcaggaggttaaagcacaagaatcgcttgaacccaggaggcagaggttgcggtgagccgagatcaccccgctgcactccagcctgggcgactgagcaagactctgtctcagaaaacgaaacaaaacaaaagacacacagaaaaactgtaaagacagaatgaaagagatgaactttttacatctcgctcatttcatcacatactatatagtatgtgtatggtttcatatatgttagtgtgtgtgtatgtatatatatgaagttaaaagaaaacattcaccttttaagactaaatggacattgactagattgtaaactgtttttgaggctaagagtttgtttgccatgcataaggctctattttttgtaattccacttttatattcatttatatcagtcctagcagtagatgccactcttactgggtcctgcctaaatgcatgcttcaaatgttggttattaatttcacgagtagtgaataacaaagactcctattgagggacctcttgatttcctactgggcaccagcagcaagcatgacttactggccttcttatgagtgggtaggagttttgggtcaacttgagaacatctatcctttgagtagtaaaaaagcttggtattaggttggcacaaaagtaattgcgatttttgcaccaatctaatatcaacagaggccgtgaaaaacatcaagggaggatagcttgtaattagaagccagatcaacagtgacccaaaaagaatttcaggtttccaggagtgaaatatgtagattactcctctgaaaggaattgtttttctcctattcgctttcatggcaaatcattttttaagccgaaactcaagctctgaaataattgtgtagcaaatagtggctgtgaatagatgtggcaactctccacaagggtaaatagaaaccacttgcagtttcagtcatcacattttatttttcttttttaatagcttctctatttttgctcaccacaaatacatgcacacacacacacaggggcaaagccttggaaaattgcaattttccattttaatttgagagacagcccggtcacattaacagaacccttgacggaataggttgaattcccttctctgtccctataaccccatggccttggacatatccttacctggtgccctttcctccctcttatggtccacttttgtgattctgattttaatttcagttctctgttagtgatgaaatgagcaactgcagatgttccgcttacactggaaatacttttttggcatttaaaagaaaaccctacagatgaattattcccctgaaaggggttcactcagattttctagattatgattctagaaaatagttctttacatttgacaatggagaatttaaatgttttaatatgaaaatgtaaagcactcttgtggggtatagttgaattatgcccaggttaagggaatccagtatttatgtcaggaaaccatggatgtgatagaaatagtatcgctacaaagctgggcacagtggctcatgcctgtaatcccaacattttgggaggccgaggcaggaggatcacttgaggccaggagttcgagaccagcctggccaacatggtgaaaccctgtctctactaaaaatacaaaaattatctgggcgtggtggcacaggcctgtagtcccagctacttgggaggctgaggcaggagaatagcttgaacctaggaggcggagaggttgcagtgagccgagatcatgccactgcactctagtctgggtggtggagtgtgacagtgtatccaaaaaaaaatactgagattatgcaagaatctgactcgaagaagtttgaactgattaaaaagtaccaaatacttcattatatgaggccagctatttagactagtcagcgggtggttcaaatgcagaaaacagatggctttcattagccagaaaccttaaaattacataaatccacggatgcaactaagctatggatctgtgccctctccttgccaaacaggacctctcagctagcaaaacagagagctccttgttcacttttccctcctagttgagaccctgttggggaggaatgctgccaagcctgctctataaggaattttgatctcctagatgataacagagagaaactttttggagaaagggaacaccctgtttgaaaggacaacaagagaacttgttcaagaaggtggctttgcatttaattgaaaattgtagcaactgtaggcgtagggtttccagattcacatctgcagactggtccagattaggtatatatgtttatattcgtttatgttatccccttaagcctcttttaaagccatttctaaaaattgctttggaaagtccatttcacttcagtattctttatattgtggctcaaaaatattttttttctggtaacaaaaatattttctttctgtttttaagacttgtagcatttttaagtttgatatgtacgtctctgtagttcagagcacttggtaaacagcctcttgcttttgaggcaatttatgaatgcttcattgtttttagctggttattttgttcattgtcaggaacactgttttcccatgggaaagcatctccagttttatgatgtcagtggcaagtcattcagtttacaagaattaccttcatattcagtcttagaaaagcatagaccacaaacggccagttatatcacagttctcatcttttaaatgttgtcttagatttttgcaaagtaatcttaactcaccttagaatagtgttaagacataaatagaactaaaatgtagtagttaagtggttatatttcccatctactaaggtatttatatttcttttcttttagaaaataaaaatgtttaaaaaattaggaataattatctttaggatgactttgtaagactgtgcttttttactggcagcaaatacctgccagatttcaggtatttggcaggtaaattgaatcttaaaagatttcaattttaagagtgtccatattaacagatcctgaataggaccctgtgtatcatttattaagtcatttcttggaggcttcactcaggaaaagggagttaacccttggatggcaatgtttaatgtggccacatttccttctggctgaatgccagggagtggctgcgcttagcaaccaggctttgtttcataaatgggttatttgatgcaggtgaggatgccgtgagttgtttgtcttgttttaattcagggagacaggcatatgtagtgaaagcatggaattgtttgcagatgggcttcagtaagaataggaaggtttctggttcaatttgtatctccaagctaattgctctgatttccatatacacatctggtgttggttcggggggaaaaaattttacttgagaaacatggcttttgtgagttgatatttatttgtgaagggcctcttgtaatgtcaaatgtaagaagatctatacacacaaccaattttacaatttctaattcaacagcttaccctattattgaggattcgcagtttaaattattaaatgatctccacttgaagaaaatagagcatgttaatcatcacgattctccaaacatttatttttaaagttaatattaaatctcatctggtggaaaacctgacaggaactgaagcatatattttctagtctaaactctcattgttaaaatgaagacaacatgagacagttatagcgccgtaatcaagttatttgaaaaaaatgttttaaaaattaccactttttggtagtcaacatacacacatatgccaacagatggcattaaaaaatggcaagaacatgagacaattatagggtcataataaatttatttgaaaaaaatgtttaaaaaattaccactttttgatagtcagcatacacacatatgccaacagatgacattaaaatagctgtaaagtcaagaagcagggaggatgacaaagtgaaaaatagaagaaatcaaaggaagttaagtcaaaagaggaaaaaaaaatgaagcatttacttggtttgtcaggtagggtgatccagtgtattttgccaaaaactttcctggttttagcaccaaatgtctcagaacatggcagctgatgacctccctcacagtgagtgatcccagagagcaatgaagaattgtgatgcccttcatgaccttgttttggatgttacacatcatcatgcccttcagtgacctttctggtagcaaagggtttgtttttaaaagagttgcagcatctttaagtctaatatatacatgctcggaagttacaccatcatcacttctgctgtactccatttgttgcacagacagaccctgatacattgtggagtttcccagggtccatgaatagcaggaggcagggactattgggggccttcttggaggctggctaccctggggagagaaattgtcaatttcctctccttgcggggaggaaatggaatcaagtgcatttgtattgacaagaaggtagaacgctttccttagacattgtaatgaacagattgtggataaacaaaagtacagagagagtttgaggcagaggaggagactgtttcaacagaatatttaccagctatggtaaaggctcattagtgtctccgtacagttaacaacatgctgccaagactggaaatctttgggacaggaatgaattcggaaggtgaacagaataaagtactgtgggaacaatggcgattccattagtggattgtacattccttacgggcagggccctccatagcatctgatgtagggccttatccacaggtatctgattattatttgactttctttaatgtttttgcagtgttattatctatactacttatttcagtaagattgacaacatttgcatttcgatttctaagatcaagacaatgaatttcctcttaatccctcaggaaagctgtgaaatttaaatttatagagcattctacttagcctgctgctttgcatctgtcagagaatgagaccccccagtttcatggaagtcacaggaagtggcaaggggctcagatggagttgaggggttctagctatttctgcagatgatctggatattttggcatcggctgctttgacttaaccatctggcaatgtaaaggcagaatttcgttaaatattggaaaagttacttgaaaacatggctctagagattttgccagcagcttttgcactcatgacttggttcaatctaagacctgttttgtttttttgttgtaaggacctaagtcctctgttgggttttgacgaagtatgtgtaaaaatgactaaaatggccagaggtatcttattttacatttatgtgggaagaaatgtttggaaactgtttcatttctttaactgaaaatttctcagtgcaattttagttggtgtttttcctcctgtggacagtttttaggaatgatacaagttatcgtggaatcacccagttcttgagtgtgtgaacgaatggcttctgctggaagttaattcttcttggcatgggtgtctcacatttccccagcagctggatttgacaagggagggcctatcatgattaatatgccttctaattgattggtttaataacacctttactcctgtggatatatttttcatttcttgctgaatttttttttctttttgagataccagaacctgttaagtgacacggtatagatatttcaggacttccattttctcttttaaaaatatttttgtaaaggtaatgcctgtacacagaagagtttgaaaatacagaaggcaccctttttcatgaagttattttgtgaagtggtctattgcctgcaatggtaatagctaggaccccttacttactacccagcaggcactatgtagagctccaaatgagaaaatgttggctccttgcagatggttgggagaggagacaccagcactcttaacagacttgttaagagttgagactgataaccagagaatattctgggggaaaccaggagggatcgccaacatactcagttatatttgtggatggtgaattctacagtgaatttttctgttcaaaatcataatacagtcacttgctaactaccaacgccatacttgctctcagtgctgagaggtggcacaaatattattttcagtcttggtcatcaggcagggcctggcaggcatcatgctctgtgtgagtcagtggagtttattataagaatgcggtagcctccacagtgattatatttattataggaaaacgtgtaattttgttgtcagaacctttcagcaggtaccacaaaatctcatatgggaaaacgtgtaaatttttcatgaataaattcctttcggtattggtaatttccttctctgttttagtataaaagaaagcattgccttataggtggctaagaacatctgtagcatacataacacttaatctaaaggagtgttgaagaccgggctgattcctaattgagaatgagcaagaatagaactctttttgatagttatccctgttcttcctccaagcctctgccttggagctatggatactataactaactgaagcttcttctttcaggtacccactgatggtaatgctggcctgctggctgaaccccagattgccatgttctgtggcagactgaacatgcacatgaatgtccagaatgggaagtgggattcagatccatcagggaccaaaacctgcattgataccaaggaaggcatcctgcagtattgccaagaagtaagtcctgtccggtggctagcaattcacgttggatcacatgcatttgttttcaaaaaatttaacttcttgtattttgcatcagtattttaaccctacagtaaaaatcttggttcctaatgattcaccataccattaatatatttatttgcattaccctatgatatacatataaatgtttttaaaattatgatgtcgtattatgaccatcactaaacagtagtttaagatgtcacagcacttttttttttcctcactctgtcacccaggttggagtgcagtggcaagattatggcttactgtagccttgacctactgggctcaagcaatcctcccacctcagcctcccaagtagctggactataggcacatgccaccaggcctgactgattttttttaatttttagtagagatggggtctccttgtgttggccaggctgtctgaaactcctgggctcaagcgatcctctggctggacctcccaaagtgctgagattacgggtatgagccaccatgctcagccctccacactcctttcatcttcagtatatatctcaccacggctctacagtcaaggtcttttggttaaaagtgctagcattaatttttttctgttaccagcttgatacatattttagttcatttgtatctgtttgtattctattatagtttggttttttcctcccttattaattttactttttgactatcatgttagttctatgaaatatactcagaaagctcacttttcactcattctctattgataaacattttcattgttcctgatttatttttttggcaaaagaaaatacatatttttccttcttgtacaaaaaaagtacaaagttcactgttctgcactttgcttttttttttttttttttttttaacttaactttgtatcctggaaatcatcctttgtcatttcgtggagatcttcatttttgtttaattctttgtagtctttttgctgttactatacagggtgctcctttcttattcaatttaaaatagctggagttccaggcattttatctcacacttcttagatagttatctctgcatgtgactgcatcttaagaacattagaagtaattagtcttatgcttgttggcaaagcagaattctcgacactcattataaacagcagatagcctggcaacattttcttttgttgtaatcctttttgtactagaaatttttctttagcctacttggataatgaatgtttgttgtttaattaatattactattctattgagatccttttattttaaattgtaaatactaaaattattattattaaaaggtttaatttgttttgatagcgctctgtttaagaaaggacaagctctaattactaattggtgttttgagaagcaaaaagcatctacattatcacaatatattacatattaagtaatttttatcttgaaaggagtatgaaccatgatgtgaaatgatgaatagtggaaatcactaatacttaagttcattatatgtattttttgttttgttttgtttttttttgagatgacatcttgctctgtcgcccaggatggagtgcagtggtgcaatctcagcttactgcaacctccacctcccgggtataaatgattctcctgcctcagcctcctgagtagatgggactataggcacccgccaccacgcccagctaaatttttttgtatttttagtagagacagggtttcaccatattggccaggctggtcttgaactactgacattgtgatccacccatgtcagcctcccaaagtgctgggattatagccgtgagctaccacgtatggtccattatatgtatttttacaagaacattctgtgtgctgatttactaagtatggattgataataaatcagcttttgcctgggtgtgacttttataaagtgtcaatgttagaaataatatttacattctgctgaagagttcttgtagtacaattgtgtagataagttataaattttataaatcagaactctgtgcatacttatatgtttttgataccatttttttgatatatgcatacagactatgtattctgagtgtcaaataaactttttttaaaggctagaattaaaatttagtttatgacattgaccaaattgtccttttctggtgaatcgactattttgatacatgtgtcatagtttgcatctaagtttttcttcccttagtttcacgtatgaataaccagatgttttcacatttgtatggtggccataccaaaaattactcttcttgaccccaggaacacccctcttttcccgtttcacttagagatcctactaatgcctgggtagctttactttctgtcttagcctgttgtttgtcccagggtgtattagtctgttctcacattgctgtaataaactacctgagactgggtaatttataaagaaaagaggtttaagtggttcacggttccaaaggctgtatgggaagcatggctggggaggcctcaggaaacttagaatcatggcaggaggtgaaggggaagaagacacatgttcacatggccagagcaagaaagagaaagagtgtgaagggagaggtgctacacactttcaaacacccggatctcatgagaacactgtcacgggacagcactcgagggatggtgcttaaacattgaaaccacccccatgatccaatcccttcccaccagaccccacttccaacactgggaattacaattcgacatgagatttgggtagggacacagagccaaactgtatcaaagggttgagcacagagtggttcttcccagttctggactttaccagattgttggtggccaccatgagtggggagaattagccctttgctgtcaccttcctcttgcaattctggtattatctgtcctctgcctaccacccacccacggaagtcttgttggatgatacacaccagccagattcttcaacattaggcgccataagtaagaaagggccaaaacatcataccttgtgagccattttaatggatttgggctttattttgtagcaacaggaagtcactagactttattttttatctatttatttttttctttttttttcttttgtttttgagacagagtcttgctcttgtggcccaggctgcagtgcagtggcacaatctcagctcactgcaacctctgcctcctgggttcaaatgattctcctgcctcagcctcccgagtagctgggattataggcgcctgccaccacgccgggattttttttatttttagtagagacagggtttcaccatgttggccaggctggtctcgaactcctgaccttgcgatccaccctcttcggcctcccagagtgctgggattacaggcgtgagccacccgcacccggcctagactttattttttcagagaagaggagtgattgtagatttgcatttaaacaaatcaccttcttgctttatcactatgtcccctaccatatatcttcgttctcccagagactgccatgctgcagcctctagccgtgtgctgtccagtactgtagccactggccctatgtggttgtttggcacttgaaatgtggctagtggaaactgatgtgtgctataagtgtaagatagataccgtatctcaaagatataatgtgagaaaacctgtaaaatgatcacattcatttttatataggtttaacattgaaatagttatgttttgaatatgttgttaaatacatcataaatgttactgagttgtaactatgtgattaaaattgatttcacttgtttcttttgacgtttcacgtggcagtgaggaaattgaggttccataggcagttgcattctgtttccgtggaacagtgctgttctctgtgctatcccgagccaccagtgactctgagctgtaagggtcttagatcccatgatctggcaagtgggagagggaggtagaaatgagtccctccataccttcaaccagaacttcactgcatgttgcaagtcagggaacaaggcttgtttggggtccttttaaatacatctttcattaaatacatttggatgtaagatgattatatgcctttctagaaccctgtggtgctctcttcctcctcagacataatgtctttggatactaagggtgcattgatgaacagaacacagggcctgttcttcaaagggggagaaaagcttgtaaaatcataattttagcaatctaaaaactacatggtgacagtgacactaataccatcagcattgagcattcacaaagggtcacaaagggtcagctactatgctaagtacttgcactcattttacccactcagtgacacctgtggagaagaaccgaaggaaagcaccttggggaattgcagcattgaaggcaaacaaagagagacgattccccatgagggagatgagcagtggccagagagataggataggaagtaggaggcgttacatgctggaaggcaagccatgtaaatttctaaatgaggggaaagataagagtgcaagcatgatgcaaacggaaagcagttgaagtgtagtttttgacatggtaaaatcatgtctgtcatgcagactgaacacatgtcaaatattttattcaattcattaatgagatgaactgtaagatgtgaaaaatggttcattttgacttggagagatttaaaattccttccccagcacacttgagttgcatggctatgaacaggaatcatctggaattatctggaatatcgtcaaattatttccatggtacaggaacacttgcattgctatggggtgtctgcagtatccatctttacaaagctctaagggtgtggaatagcttgtaaggatgtaagtaataagggtgtaagaattttaagggtgtaagtcgtaaaatagcttatttagtagcaagtcaactggaggaacatgctgtagaatcagataatcctttccccgccaccctcagggtctgcaagacaacacctgcatttcaatgctaggacacccagcaatctcttttgctcatatcttgtttttggacatttgtatgtgtgtgtgacaaaacattgttaggatctggcaaatagaaggtcattgttgaccctgtggaatagcatggggagaagttacgttgtagtccattgcaggaaaaacaacgtgggtcaatggtgagtcagctgtggactcctggaggaaagacctagaggcaaaaagctttgaggtcattgaagacaaaaggaaaggctttgtgattttgatttttaaatggaaggaatttgggcctaaggaagcttaaactaaactgtgggaaggactgatacccatcctaagcactagttgcaggtatctcttaagaactaggttttggccgagctccgtggctcagacctgtagtcgcagcgctttgagtgagaggatcgcttgggcccaagagtacaaggttacagtaagctatgactatggtattcagttctgtaagaactaggcagaaaggagatccagtggatatgtgattgcctgggtcttggaaaggggagggaacatctccttttctgaggaagaatggggagatagggtgggttaattaggcagtttcttttgccaggtgataaaaaccccctaaacaatttgtattttatatatggagaatattttctcccactgatgggaaggatcgtagtgtgggggatgcttacccaatttcttaaaaatgtacacagaaatgagatccctaggtgctggaaccgagggtcagtactgcctagaatttccccattagggtctcttttgtttctgcttaccttcctgctgtgtgtttactccttttctcctgctaagatgggtgtcctcaaggagaccagggatgttggtagccacgacctctggtagtgttagtcctggtttggcatcccaactttgttctgcccatgggcattatcagggagtgcttctggttggcactgctttgagttacacgtctgcccttggagccaccaccgtatctgcagggactcagtatcaggactagcccatcttggccttgtgggtgtggccgtgtgatgtggggagaggagctgttgccagaagagggatgaggaatggcatgggcaaaatagaagaatgaccccagtgctgcaacacagtgggtatggattagaaaaggcttgtaggctggacagggcgaggtgagggagtgcatcatgcattaggattttaagtggctttttggggagtattgagcaggtggcaggggagacaagttcactcagaagttttagacagtgttgacattttctttcaaattgtgcatcttgaattctctagaacattctttatagatatttcaggatcttcctgccactttccacattgtagctattctggtgtttttcttttataattagaaataatgaatagttctcatttgtaggcttggattttcatgcgtgtgttggaaagtgttcgttttgccttttttttttaacttcatgtttttattttttaaaccgtattgatggattcattgctaggaacggcaaggaaaagaatactctcacaatgttaccacgtttccttctcacaggttttataagttgtattatttttatattttcaaagttataatcttaccatctcctctgttgccatacttctcattcatagggtctgtctttaactggactcattgtttacagctagtcttttcatcagatcatctcaaaccctgtattacattaatattttgattccgttttgttggatgactttcatcttaatcattcttattgttgaacaatgtttttcttattattgaacaattgcttcattaggtatagaattcctggttgatgggtgtttgattcagcaccatgaaaattcacggtattctggtatctgtcattgggcaaattcttcttctttttttttttttttttttttgaaaaaaatgcgtggaaaccattagttaccattgacagagctactcatttaatgattttttttttctcccaatagtggtggatgaattttttactttgcgttctcactttgtgtctctcatgaccaaaatattttagagataactagctggctaagtctgaggtggctgttaacagtctggtcctaggatagaacaaaaccaacagaactcatcaccgtcacgtcgttttgactttttgctcacaagtttaactcattgtttaatttgtttttccaaaggattgctttgcagtatacatgttggtgcatagcttaacatgatgataaatacataactttgactgtgaattatctactctgctcctttcatagtctcatgcttctctgaatttgtattttgtgttactgggttgttttgttgttatcattcatagtgttttttttgcccttgattctttgatccaggttttggtcaagggcaaggttcaagagaaaaagtaaaaacacagtcttttatttttgctcttggttataaacccttgtaaagtttgattgagaagataacttggatcttatggtttaaattgagtctttgtttaatcccaagtcttccaaattctttgtgcttatgtattctttcctctttcccaatcgtaatagttttgcttctgcctagtcattggtcaaatacctgcctttcaatgcatttaaaaaatattttgtgttagcaccatttgagatttttccccccttttttttcaagtatgtattgaggactgttatgggatgaatgtttgtgttcccccaaaatttagatattgaaaccctaaccccaggctattcggagatggtattcggagatgatacctttgggaggtgataactgttagatgaggtcatgagtatgtgcccccgtgatggaactagtgcccttataagaaaagataccaaagagcttgcctttttctccctgctcaaacgaagaagtcacataaggacacagcaaggaggtggctgtctgcaagcaaggaagagcggcctcaccagaactcggtcatgctggcaccttggttttggacttccagcttccagagctgtgacaaaagacatttttgttgtttaagccattcacagtaaggcagcattttgagctaagacaaagacctactgtggcttctgtaggcaaaagccctacagacccaaagtgttgtgagaattaacatttctagggatcatgccttacagtggattttatccaacacttagctctgacctagagcacgctagtcgtcgttaggtaaatgcttgtggatggtagtttctggcacagagattggagcggtaatgggcaggagttctgtatccagcttatgctgagagagcttcccataaaatggagcctatactttccttttgcagagaccatttctatccattgatagaattcttttttttctttttcttttttttgacgggatctcactccatcgcccaggctggagtgcagtggcatgatgtcaacccactgcaacctctgcctcctgggttcaagtgattctcatgcctcagcctcctgagtagctgggattacaaggtgcacgccaccacatgtggctaatttttgtattttggtagagatggggtttcaccatgttggctaggctggtcttgaactctagtgatttacctgcctcggcctcccaaagtgctgggattacaggcatgagccactgcacccagccttccatcgacagaattctaaagacatgtttaggcaagagttggtggaatgttggcgtgtagtccagatttgccttcagtttgtttttatccgcttcaaatgcaaaggccatgataattcaatagtaaagtcataaatccatagtatgacttaaaatatttggttgtaatattacaaagtatgcttccaaacacattaagcatgcaaaatccttatattgttctttttgtttagtgtttagggtagtttgtgtgaatcatagatgaccacagtagactgttgagttgttattttcttttgacattctttgatagaaaacagtgcttttcctctgttatttatactagaagcaaaaagtatctctcatagcattatggaaacaactcgaatacaactacgtcaattattcatcttttttttttttttttttttttttttgagacagagtcccactccatcaaccaggctggagtgcagtggtgcagtcttggctcactgcattctttgcatcctgggctcaagtgattctcgtgcctcagcctcccaagtagctgagattacaggtgcccacaccattctcagataatttttgtatttttactagagatggggtttcaccatgttggccaggctggtctcgaactcctgacctcaagtgatccacctgtcttggcctcccaaagtgctgggattacaggtgcgaaccactgtgcctggcagttattcatcatttaacagcataaagtggccacttgctttaataaactattatagtaccaaaattttggcctgaggaatttataaatataaatagaacaaaacaaaaataatattccccttgaaacatattctaaaaccaggggctaaaagttagaattgttagattttattgtcctgtttctttgggatgaaatgaaattttttaaaaaccatagttttggccgggcgcagtggctcacgcctgtaatcccagcactttgggaggccgaggcgggcagatcacgaggtcaggagatcgagaccatcccggctaacacggtgaaaccctgtctctactaaaaatacaaaaatatttgccgggcgtggtggtgggcacctgtagtcccagctacttgggaggctgaggcaggagaatggcgtgaacccgggaggtggagcttgcggtgagccgagatcgcgccgctgcactccagcctgggcgacaagagcgagactccggctccaaaaaaaaaaaaaaaaaaaaaaccacatagttttacttaaaccaaaggctttgggattccagaagaataaaggaagtgtacttcaattctacatctcaagaatctatttcttcccaaatttaatacaggcaaatttagtctatatttattgggcactgttaggtttttgtgtcaggtgttgctgagtggcgggataccattcttggcccataaggaccttataaatctattaatacaattaaattgtgaagaaaatttagaaaattgcaaaggtagaatgaggttgcaaattggagggtcttattctggagataggtggaagctatggcagatttttagcatgaatgctttctggtcaagacacttttagaaaaattagcttgtttccaagagtagattagattggggagagaaggaattcaaattacaaaataatagtgtgaaaagcattgtgggagatcatcctgtccatcccctcattcatgatatcctgaggtgctgtattaagggcatcattgctctttgtcacccgagcagtccaggaaggctgcctgttcagtcttagactgtatcctcacagtcttaaaccatatcctcactttatgatagaaacacacaggcaagtgttgtaagagttacatattgtcagttaaacaagaaattggatgagtccccatactattcttcctcttttaaagagagaacttgggccgggtgccatggctcacacctgtaatcccagcacattgggaggccgagtcgggctggtgacgagatcaagagatcaagaccatcctagccaacatggtgaaaccccgtctctactaaaaatacaaaaattagatgggcatggtggcgcacgcctgtagtcccagctactcgggagactgaggcaggagaattgcttgaactcggaggccgaggttgcagtgggccgagatcacgccactgcactccagcctggcgacagagtgagactccatcccaaaaaaaaaaaaaaaaaaaaaaaggaaaaaaaaagagataacttgaaacaggctcttccagcctctctattcttttaataacatgcagtgcacttcttggagctaggggctagggtctaggggcttcttgaaggtgttgatgtctctggtaacttacactgcagggcaggtctctggagggaactttgaacaggttaagcctcaaatgcaggcagagatttccaattgggaaagttaggtgaacgtggctttatcatctcttttattggtttatgggtattttctctttttcctgttttctttcccaccatttaacattatctgttctctgcctttttaaccttctggctttaaatgaacagttgcttaatctatagattaacaggatcagcaaacaaagcacagcagtgcctgcacaaagcagaaactgcctgttagatgagttgagcaaaaccatttcctttgcccaactttctcctctaaaatacataactgaacatgggattcccagacacgaattgtttctcaacctttctttttccattctacagttgtatgaaattaaaattaaataaaaagcaaacaacagaggtagtctttttaatcttaccgagttggaaggtatactatatacattatcctatggtagaaggtctggtacattcttgaccattattactttgctatgggcacccttcacccttgtaggctgaaaattggcaaatcataggcacgtatacattgtggttttggaatttgaaagatctcaaattcatattgagtgagacagtttttgaatggagggatcaggctgtctatatgtggatatattttatgcatttctggtctgtataaatgtaaggattgctttactgaccgtagatttcttctagggttaaaaagttgaagccagtttggatattttaaaataagaaaattagccctacattgaaagagagaataggaaaatctaggctatgtgtacacatctgcttgtgttttcacaattgtgtcctgtcctatttatttttatttctctcccatctcttccctcccacccacaatttgtttttcattcaacactttgaaattagaatagcttatctatcaaacaaggttctttgacaggattttccaactctgagtatgaaagtgtggatataacaatatatttatatagaatgtcagaagcagagtttggccagattattgggaaatattctaacgccctgcagcattttaccgcctttgcttttacataaggccatcatttggaaacatagcatgctgatacctcccattattgcagtagcgtttcatcagctgcacgctgcctctcagcgcctcattaagttgcaagcagagaacgttttcgttttccagttctctttctcaattaagttagagattgtattttcagtattcctcattattaaaagaatttttgttgagaatagtttaagatgtgatatttctttgtattccaggaaaatttaaagaatgtcattgaaatccagaaacagaagtatatattgtctaggacatgctttgtcttggtttatatgcctaagtccgagtagtttaaaatttatgattaatatactctttgaatgcttagaaatggcatcgattttagttgttctagtttcatcttaaataaattggagtaattactaactcaggattatgatgtgctacacataaaacatttgcagtgatgtctggtacttaggaaaccctcagttatgacatttttcttactttcttcttggatatgttctttgaaaaagggactggtatggaaaagctttgagacgatgaaaatatacaagataggctatctctgaaacaatttggtatagagcatttgattctctgtttcatgtatatattcatatatgctagctgcagtcatgcagacacaatttggatctgggtttttttttttttcctttttcacatgcagttataaatttagaaacctggctgtttcctctggactaaatgtatttatttaaattttcagtgctttaaatgcaaaattacaagcatatgtacaagtagaaagaatagtaaaatgaaccctcccatctatctgtcactgaattgcagtaatgatcaaatctagtcagtcttgttcctgagtcagtctggaatgcaggttttttcccttaactattcaggttctccagcaatcctggcaaaacacatgcgggtttcagctcatctctttcagtgacctgtaaattaagatgtgctaaagcatcacatgttactcattgacgttttgttaatatatttaaaacattttattagtaccacataatttttagcgttttcaaaaagaaataagaatttggctaaaggtgaattttaaaaattgaatgactaagtagaaaagtaggcaaactgttttcagaattagtagcaatttccaattccatttactctgttcattaactttgttttcagccttttgttagccatgtttgattttgtgtttttgaaatacctttggtcattttaggacttttggcattaatcacctgtcttaggtggcctgtttacaaaagggacttttcggttctccatttgcccttaatgttgggaatagagacaaagtttctgtaggactctgacaacatatggctttacaaagtttttttttaatatatacatttctcttcttggctttcttaaatatcatcaatgtcttttcttgctttacgtatttagcaacttaaatgtcatcttgtctgagatcaatatatttccaacttggagagatagtgagaagagagacttcagatttttaaaatgtggaacaaaacattctgatggtgaccaggttttaaggtatttcttcagtagacaaaactacttaggctaccgatgataagcttttaatattaataataattattatatataaaaatattaatataatatgatctaagattgtttctattccccctctttcctggttgttaggatttggaatttcttatgcactctttttttttttttttttttttttctgagacagagtctggctctgcctcgcaggctggagtgcagtggcgcgatctcggctcactgcaagctccgcctcccaggttcacgccattctcctgcctcagcctcccaagtagctgagactacaggcgcctgccaccatgcccggctaatttttgtattttttagtagagacggggtttcaccatgttagccaggatggtctcgatctactgaccttgtgatccacccgtcttggcctcccaaagtgctgggattacaggcctgagccaccgcgcccggcctatgcactcttaaaattatttcatgtactgatacattcactttcaatgataaaacatggctgtatgaccaggtaggtaggctgcttttcagactcctgtactaactgaatgggccccattagcccaagtgagagcttaacttgtcactcttcctaaatgccttcctcagctgagtgcttatttacagtaatctactgcttatagcagatgctatgatttgtataagctgtccatatctacttggaagaacaatattgaaaggcattgagatacttactttccctcaaaagcccataatccaacaactatttagaatatcttatttaagagataggtttataatacccaaagggaacttaatgtatactgaaagtccctgattgaatggattctgaccttaaccagaaatattaattacatgcttatcagacacttactgtgctatcccagggtttgccactgttgagggaacaccagatgaatcatattgtccctgccttcaaggattatatattctaataggacagacagcccatcagcagaataggaggtagcaagtggtcagggatcagataaagtgatcaaggcaagtggaggatgcagtggtaggacagaatggtctgcgcacagagattgagggcatcatgtggtgggaattagtgaactagcatgcaagccgggcctttttcttggcttttgttcaattggaaggagcataaagctactaaaggagcttatgtttagaaatagggcttattgaaggggacaaggcatctcctagaatccaaatgcacatcccaagacttaaaagagttagagggcacaggcaggccctgtcagatccggtctctgccagatccagtcttgtctgtttctcatcttcccttgtctctctgagtattccctgttttcctttcctggactaactgcttcttccagatgcctagtttgagtccacccatggttttttgggggcttttctttgtttttttgttacgttctgtttttgttttttgtttttttgaggcggggtctcactctgttgcccagactggagtgcagtgacgtgatcccagttcactgcagcctcgacctcctcgcttaagctgtcctcccacctcagcctcccgagtagctgggactataggcgcaagccaccatgcacccatgggtgttgacatgccacctgtggctcagacttatgctcacctccagtcaagtttcttccttatctaacgacagcctttgtgtgttcgtgaaagcccttgagggaaagaatgctacgtacagtttggttttcttgggctctaataagctataggggatggtgctgcagagtttgaaatacagtcactaatgagtcctccttcagagagctgagggtgggagcaccacataaaaggagttgggggtcagcagcctcctgatagtctgaaagccaaagatgatggatgtggggctccacggggaggctataacatgccacgttatgttttctgcccttgaggaaagcttcttttcaccaggcaggcagtacagatacaaacttaatagcgatgtgaggcacactgataaataccagaaaacattctgtaagaggggttagcattatttcactgtgtgcagaggaggtttgtccatgtggggggaccctaatgggcgtaggcatttgaagtgtagtctaagggatcttaggtaagagtgtgtttggaacacagtgtacgtatttatacagcaaatgctctgtgtggctataatttaggaaaatttgtaggacttgaggacagcttatttttctactagctgacagaggcttgggtttgcttctgctttaagtataagtatctcgagtccttttttaaaaaggaaaatcaaggaaatagttggaattgggtttcacataaaaaacattttagaaaagaaggggagtatgagagttaggatttgctaatgtttgctgtattagcaaattatttgcaatgcttgtcatattagcaatacatgtatgttttggaaaacacatgcaaattaagcagcttaaggaacttttatctttatttcctatgtaagatttgagatgctgcaaagaaaatattaaaacattgaaccgatacttacagtagtcctcctatatctgcagaggataacttccaagacccccagtgaatgcccgaaaccttagatagtaccaaacccaatatatactatgtttttttcctataggtacatacctgtgataaagttgaatttacaaattaggcacagtaagtaattcacaacaactaataatagaatagagcaattatgacactacgccaccatcactactcttgcactttggggccgttattaagtcaaataagagttacttgaacacaagcgctgtgatgaagtgatcaatggcaggtagcatgtacagcatggagacgctggacaaagggatgattcactttctggactgtgtgggtttgagatttcatcacactgctcagaatggtgcgcaatttaaaacttattgttggctgggcatggtggctcatgcctgtaatcctggtactttgggaggccaggacaggaggatctcttgaggccaggagtttgagaccagcctgggcaacataggatgaccctatctctttcttaaaattaaatataggccgggcacggtggctcacgcctgtaatcccaacactttgggaggccaaggcgggtggatcacaaggtcaggagattgagagcatcctggccaacatggtgaaaccctgtctttactgaaaatacaaaaattagccgggtgtggtagtgggtgcctgtagtcccagctactcaggaggctgaggcaggagaatcgcttgaacctgggagatggaggttacagtgagctgagattgcaccactgcactgcaacctgggcgacagagtgagagtccatctcaaaaaaaaaataaattaattaaataaatagaaaaataaaactcatttatttatagagctttctatttaatatttttggactgaaactatggaaagcaaaaccacagataagggaggactactatagttatgataaaaatcaggaacttaatctagccacgagaacatttgtatttctgatgaaatttttattcttgtctaaaatgttgaactatatttatatttatatctttaaatataaatgaactatatttatatctttataaatgagctatatatttatattttatataaatataaatatttttatatctatgtaaacataaaaaggctttttttcctctctggatgtttactggggttatttaataaaaacctagggatgatattgggaatttttgttggaattttaaattttaacgtgtttgtttctttttttgttttgtttcgttgtttgctttctgagctgggagttggctgtgcatgtggcagttgctttatcaaaagggtcttgctctgcttcagaagaagttttgttaccttgattgctaatgttctcccccttaaataaacctcctgatgttggaacagcaaaattgcattatgtttggaaaatctaaattaataatcccttatctctgaataaaagtaactgaatcaggttgaatttactgcttccattttaataggacagtaggaaaaaactatgcatgggctttatgtggttcaaatttttttttttttttttttgagaccgagtctcgctctgtcaccaggctggagtgcagtggtgtgatctcagctcactgcaacatccgcttcctgggttcctgcgattctcctgcctcagcctccggagtagctgggacttaacaggcgtgtgccatgacgcccagctaatttttgtatttttagtagagacagggtttcaccatgttggccaggatggtcttgatctcttgacctcgtgagccgcccgcctcggcctcccaaagtgctgggattacaggtgtgtgccactgtctccggcctggttcaaattttgtaatctccacatccatctgcatattaacaattgtcattgttggtgttatagagagagaagctgaagcacagaaaataacacgcatgttctagatttcctggtgggaactggaagtaaattctgtgtttggctgatcactgtataaagttctagtactagtctttagggaaaagccccgtcttcatggattttaatttgtcaatttgcaattctacctacttggaaatagtcaacctaatcagttactgccctgttgcaccaactattaccataggaatctgaagatggtatgcaaccaacatgaaaaagagatccttttctcctggtaatcagtttgtaccctacaaacaattcgttggttttaagttgtatagagggaaccatgatgtgaatatgcctgccactgggtttatagaaaaccgatgactcctgaggaaattctcagcagggttgtctttcagtgaaaagaaccctttagaaagatgcagtaactcacactttactgcacataaagtcatgtccctcagggtggactctcaggtgtcatacagtttatgactcatgagtgctgcagctttgtgatctaataaacaagtaaagacggtgggagaattatattcctgtacaaaaagccacttcacctttcattatataggaaaaaagccatgggaatattaaatttttagtggcatttttagagcattttctgtgatctaaagtgcctgcattgagatattaagatacttaagaacaaagtaaaataaagagaagtattaatagcaggatccctttggagctaggttactgtggcagtggtttcaagaataactctctcagcacccaccccaggattctgatttagagatttctttgtgtgttctcttagcatatacctctaccactgagtttatcccctgctgctacactgattgataccttatttttaaatttttgtttttaaaatagacggttttttagagcagttttagattcacagaaaagttgagaggaaggtacagaggtttcccatatacttgctacctgcacacatgcttagcctctcctattataaacatcccccacagaatggtacatttgttacaatcgatgaaccaacattgatacatcattagcacccaaagtccatagtttccctgagggttcactcttggcggtatacattttttgggtttggacaaatgtataatgacatatgtccatcattgtagtaccatacagagtagtttcactgccctaaaaatcttctgtgctctatctgttcatcctccccctgcccccaaccacccaaacccgtggcaaccactgatctttttagtctccatagttctgccttttccagaatgtcatatagtgggaagaatgtcatatagtatggagcctattcagatgggcttctttcacttagcaatattagttaagttcctccatgtcttttcatgggttcatagcccatttccttttagtgttgaatgacattccattttctaggtgtgtaccccacagtgttatttattcattcacagtaccttattttttaactgatttttttggggtctgggactaaggtgaggtaaacaaggcagtcaggaattgagattaagaatttttaatgtaatatttttaaaaatcaaaattactgcaaaaaaactccatgatgaacaaaatatcaactttttagacagagattgagtcacgctcaattgacatcaagccatgcatagttctcctactgccttattaaaatggaagcagtaaattcagcctgattcagttacttttattcaaagataagggattattaatttagatttgtcaagccctctgaatgtcatggacaattgtgagtgaaattccgtgtatcgtctaactccccatggatgttatcttgctcagaaaccttgttctccctccaaggaaggcactacttctcctgtagccttctcaggtcgaagttcttttctcaaaatcctcacagcgttgcccctagaggtgggaatgtcctcttttcctcttcatttcctcttttcctcttcatttttgtttccaaaccactcttcctttctcttccctaaaagcccccctacctcagcttgaagtgcatgctttcagacaaatcactttgctcctccacctgttggtcatctccagacctctttctacctcatcgatgttcaccattcagactttgaagattttagctcctgccttgctgtcatcaggtgtagctgctcatttgctgattcttaagtgatcctaatattgatctcaatgatccttccagtattccaatttgtcagttcatgattctcatccctccagtgaccttgttttcatcattctccatcacccattgcttacaatggtcatattatactccttgcaatgaccaatcactgcaactcctccaaaattttaatttcaattatttgactctccaagtactacttattaccacctcactttctccagtcctgtgcgccatacattctttagcccctggagtgtgatcagtggactcagattccactggtccctaccaccttttacctgtgtctaattcccctcatgttctcacttttgccacttgagattgcatggcccagcattctaatcattcccttgcttataccgtcacttctctattcgttgttatttatctggcaaaacaaccaccctgttgcaatgcaaggtttatgcaagggaatgcacattttcgaaatagatttttatgtttatgtttttctttcaaatctctactcattaataaatagaagtggtttgatatttcacaaatgtgatttaattgatcaagtttcacatttcattctaagtgctcagttaaacaccatgatgtattcacaacagtaatcaaagcaaggggctgtagttagttataggagcaaagagaattcatgagtttatttttatctaaatgacacccttgataacttttcgataagttattttcatgtaaattacttggaataagagcaggatttttatatagaaagctttctatgtgtcatatcctgtaaaatgtttgtccgattagtgagagatagggggaggttgaattttactaaacataatatccccagccatatctactgtaacgtttgtttaggacattacagactattatcctacaccaatttatttcacatcaaaaatcaccccatgcttgtaagaatcctcctttccccctcttgtttctattttagctcccctggaaaaataatattttaagtctaaatgagtacaataaattaaaaagttgcattgcttaatattttgaatggaatagctagatgcttgttcatttgctatctttttctttgtactgaatttctttagcttggtcagaggtagagcaggcttgactcttagtggatagtggtataggttgagtatcccaaatttaaaaatccagagtccgaaatgctcaaaaacccaaaactatttgcatgtcaacatgatgctcaaaggaaatgctcattggagtattttggattttggactttccggattccagatgctcaaccagtaagtatataatgcagatgttctaaaatcggaaaaagtcagagaccttgaaagcacttctggtcccaagcattttggataagggacactccacctgtaccttacagtggaggcttgttagatgcttgtaaatgccagcccctgcctcaagtaacaattgattctttttgtgtgctctcccaggtctaccctgaactgcagatcaccaatgtggtagaagccaaccaaccagtgaccatccagaactggtgcaagcggggccgcaagcagtgcaagacccatccccactttgtgattccctaccgctgcttaggtgagccggccggccgtggggctggtgttgattgggggcctggtcttgagggaagaaaaagaggatgctcctgttaggtcacatacacagacttgttcttcagcacattgccactctgtgttgtactgtgttttggactcttgcagttacattctgtgcactgaccctataggagcagtatttttgagttccctgcctcagaatgaatttacccagggtgtatattgaaattacaaattcctgggccagttccaggactcctgaatgaaaaatgcctatagtagcggatccgggaattcttattttaccgtatcgcatagatgattctcatgaacaggggccttgtgtgtttcttcacatagactttctagaagaaagaatctaatgtgaagctgcagcattttgttaatttctaaaaaaaaaaaaaaaaaaaaaaaaaaggctgttctacaataactactcctcttatttggtgatagtagaggaattggaattgggaaggctttttttctgcttacatcaaactggaggaaacagtctgattactaatgtttaatgtttgttttgtcacaaacctcaaatttacctcaacattttatttaaaaaaattgagtagttttatgtggtatcgtgctcttttcctctggaaactgtcatactccatatttaatctaacttggttattagtctgttcctagttgttgtttttatgtgaccagtcattgcagaagtcaagttctttgctctggtatcttacatctagatgttttccacaagtgtattcatcagtaggcaggttgtaaataaggatatagagattgtctgtggagattgtggacaaatattgatgtatattctgatgacttcttataaaggttaaaaggaatatttcaaagaaaatccaacagcaaacttacaaagtaaggatatttactgaagattccggagatctatgtaatatatggtcaaaaatgaatgtcctaagagcatactgattgctgttcattcatgtgcataatttgagacataaaatgaaaacactgggcattagaaagaagatttcacctggtgaatttacttacaatgtaattgatgaagagagtgtagaaaactagatttcttaaacatctgataattcaagagtttcctttttcctccttattccttgttcctatatgctttataaggcctcaactcttttctggttcatcaaaaagtgcagtttaattagatgaaaataagcagcacttaaattctagatacagaactcctactcaaaaaaatatagaagtcatctgtccccaggaactgtgtattttatactcacttagttattacaccaagaaataacacacagagattgaacaattcagtacaagttaggaagtagatcatgagtctgttaatttgatgggccaggctttgttaatgatttgtttcttttggttcttacttacctgttctatgaagtattccaaatatattttcattagaatgtaagctcactgagaacaggtagggctttggatgggcattattgctcctggtatgacactcaaaactgcagtcatgtttcagaagtgaacttatcattttacatagatttttctgcttcatattctattcagaatgatttgtattaaagttgatggaaagatgaaatccacattaagattgttatttactacctagtgccagttgttgtagcaaatatcctttgaaccccaggtctattttatcctatctgttgatcacttcctttgcccctgctcttcaagcctcctcatctctgaaaagctctccttccactgggtgtggtggctcaagcctataatcccagcactgtaagaggccgaggtgggaagattgcttgagcccagcagttagagaccagcctgggcaacataatgagaccccgtctcttaaaaaaacaaaaacaaacaaaaaaacctccaagtgaacgaacagtacaacaagtaataaaggatataaaagatgttctcagatctcaatatcaagtcagaagattttataataatattataattacacggagactgtccaaatatttgtatttgttgtgctacactgcattatgcaccatttagggaaacaacagcctaagtaatgtggttttaaataattaatctcatctaccaaatacctgtttgatagtaaagttaatgacctgtcctcaccttatgtttttaaccattatggaaagagaaccacttgaaaatatatcattccactgacagataattacccagctgtgaagcacaggctggagactggcaaggagaaatggagagaagcctataaaataattctttctcagggaaggagtttattcctgccaaggctttgccatcaaccattatcagatttctctttcatcctccgaacagattctgggctcctttgatgtggaggtacataattcaaaaagttgggtcacttgtgacatgttaagcaaatttctcagttctggttgtgtctgatgtgaaatgagcacgttgacactaactgttcttgactactatgggactagataatcatttgctatttcctgtaggtacttggcgtgttgaatcattttaccatattttctcattttatgaatcactggtccttttccattggacctgaaattagaccctaatatgacaagtagagcatatgttgtctcttactttgttattaaccttagattagaattaaggaatataggtgctgcttttttcttaggtagtggcaaattttccaaaggtctcaagcccagagtataatacagagttgataaaataacctggtagagtatgtagagcatgccttgtctttcaggaaaaggaactgaaaaacataggttttccaataggtgtaacataggtaacatagggacataggtgtaactgatgtacattttacttgcacttaatagacaggcagtgttagttcttcgtctctcttcacaggctatacaactaccaagatccagagaggttgaatttcttgctataactcacagcaaataaatgggagagtcagcactacagtccaagctctcttgattattggtccagtgttttttacagtatacacaaaaatttgttttaaaacaaatattcactatgaattagagacaatagcactaaaaaagaaactcacagctatcgttgtgttgacagaggagacaaccatgacctagtataggataaatctccatgtgatatgttttctactttatagtagtagtaggtaacattcttacatattattcctgcttaacaaagaattactgttcagcattaacataagtatgctctaaaatctcttgactgtatccaaatatatgttttagacaagagttttttttttttactgacctagcaaacaaaataaaattatcttaaacattaagcgtgttaaaattcaaaacaaagcttgaagagagaaaaatgcttgttatgtgtggcatacaaccttcctaacctctttatcagatgaaggatccagtgtggcactggattatttttctgtaatattttgcctcggacatatgtgctatacatttcttgtctgcatggggaaagtatgtcaggttgctgttgccactttcttcccatggagtggataatttcccttgagaataagttggctttctcatctcaccctttgcttttggtagtacctctggaaccagagggtaagattcatcttaatcatgtgaacattttattaattatctcatgtgtgattcaagcacatcattactgttactcaaggagaatattttctttgcaaagctttcaaccctttccatttgaatgactgctcttcatggtgtaatagatccactgttgaaattggcacttttctgtacttgtctctgaccagcaaaggcaaggaacattgcgtaaaataaattactgttgaattattggggcaaagtcaggttaatagcttaatccaaaaaaggaattacaagtgaaagaattttaccttaaatgtcattctgtttcattttgtaattaagaccttccaaatgtgtaagtagtaatgaccagaaatcttatcagatatggtcaaatgagaaaggtattcaattcatattaattttgaattttattgttttaatacaattttaggaaaagcatgccttgttttctgggtttcttggctgcctttgtatcaattatctacagctatcttctttagcatggaaaggatgtatttgaatactgtgacattttataccagggtaattctttgaatttatgtaaacaacaactctcttgagacacatcagtacaacacaatagtcagaaatgtcacatgagagttcaccaaactttaaagatggcgatgaggatggaaaaacatttttattgtagactttaaggatcttgtaaatccccgtatgtaatccagtgtgctagagaattggtgcccatggcgcctcctctccccaccgacctgcactgtggaaatcctactaattttgaagtcatgggagatgcatgtgtgggacctatacatgcactgtgatgagaatgatgacttcatcattctcattatttaatgagcccagctgctgcatacaagaaggatgcaaattcttgaatgttcttgattgtttacatcatggtctcataaggaatgaccagaattgctgggcatttcttcatcaggaaaggctaatcagccatccttggagagacatcagactcctttatatgtggccttcccatgggacctttgaatggtcaacgttaatcatgcttcagaaccagcatactaagtaaaagaaaacatgtccggaaaagaaatcttatcagtgtttatctcccaacagtgggattacaggtgattttgattttatttaagcaattttctatgactttgtataataaatgagtagcttttataatcagcaaaagatagactatgaaatcagtacatataattttgtatttgtatgtagtaccattgaaggataatagaaaaaagtcaaaagacttgaaagtcgacacagaatgatcattaatttgttttatctcttggtagttgtactttatgagctttatacatacagtatgggaaaatacactttagttttgaaaacaccatgatgccaaaataaaagaaaataacgttcattcatacgatcttcaacaaaatttaagcagcattaatcatcactgattcttcaggaagattcttgatcttccttaattttttttccctccaaaattgcatatggcagccacatttgtttcaggccagaaggaagaatgggaagagcttacatttatctcacagattccttctgggtgaggaagacttagaaagtgaagccctcttccatttgattaagcaagaacacctataaaaatggtgtcttcggccgggcgcggtgctcacgcctgtaatcccagaacttcgggaggccgagatgggcggatcgcaaggtcaggagattgagactgtcttggctaacaacggtgaaaccccgtctctactaaaaatacaaaaaaattagccaggcgtggtgcgggcgcctgtaatcccagctactcgggaggctgaggcaggagaatggcgtgaacccgggaggcggagcttgccgtgagccgagatcgcgccactgcgctccagcctgggggacagagcgagactcagtctcaaaaaaaaaaaaaaaaaaaaaaaaaaaaatggagcccttctaggtaggtcatcctccatggctcactgcagcacttccttggccctgtcccaagttccataattgcctcaattgcattggctcctgcttgatttgctttctaaaactcaggacagaggatgagttgaggagactgacttttttaacaatcgcattttgaaaagaaggaagcgtagtggtgtttcttggctccgtttccagttttgtttcttttcattttaattattgtacctggtattgtgtcctctttctgggacttttaacaactaatgttttgattgataagagctctaatagcatgggtgatttatacttcattacatcttcagttttgtcttctttactggagttgtattcaggtgtcattaagtaacgaggcattaaaaagaaacgataacttttgaaaaactgctgttatggcttatgagtgggctttgctgatattttcttgaagcacagaatttatctatctctgtaggtcctagatgataggtgagaaaaagaaacccagcttatttggcatgatattgtcccaaggcttgttagtaattgctttgaaaaatgaatagcaaggctaatggacatctgatttgtagtacatgctaagaattgcaaatgtgtgctcaaaagaaatttctctgattacaaaagtaacatatattcaacgtacaaagttgagaaaatacaaccactagctaaaaataatcaaaaccatttggcttccttgcagtctacatttttttcatgtatgttttgcttttgtttttagtgttatttaatcgtttcctgttttgtgacttgctttttacacctaacatttttagaatactctacctgtgaaattaaatattcttggagagcataatttttaatgtagcatcacaccagacactgtaatgtgtttactcttttttatggtcatttaggtggttttctttattttgtggtggtgtaatagttgttataaatgatgctgtgataaacatcctggtagataaatttgtgtttagttgatttttatataacagttattggcggaatgccttgcaaatcttatagttggtgtaataaaatatatgcgccacataattgtttatgaaaatatggaggaaaattttaatactgatttatgatcctgagtttaacataagcatggatacccctacatttagctatgatttttttattgatagagtaaaagcgcctgtaatttctacttaaggccatttaaaataattactatttaaatctatttaaacaattttaaatattgcttttccaaatttccaccttaggaagtagttaattgaatattctcagagaaataagtcctacaaaattgaccaataaaaggtcagttacgtattcattgtgtacgttttattgatcacccacagtgtgtgagcccctggaggtgggtgaaatgtgggcctccctcttacagagttgatagtgggcctgaaggggatgggatttcagctcaggaatttaaggaagacttgacaggaagtagcattgtgagccaagatttcaaggataagatttcaaggcaagaaaggagatgtattttaggtattcagacagagggtcaacaaagtctttaaggtaggaactagttcacttttcaaaaagaagaggtaattggtcatgataagagtagtagtttttaaaaatcattactgttttcattcatttataatgaatactattattttataattttaaagtttatatccaaataattgttttcaagatggtaatgaatgtatattgcttttatgtatacacatagtactttttgctttttggtaactaagtttataatttttgagggcaggaaatatttttgtttttcacttacaaagaaactatattttaataagagttttttgacagcagtgctttatgccaaaggaaaataaagcaacatttaacatatcaaagaaagccaatgcaaaacaaggattatttatttatttatttattttattcatttttgagatggagtttcactcttgttgccccggctggagtgcaatggcgtgatctcggctcactgcaacctccacttcctgggatcaagcgattctcctgcctcggcctcctgagtagctgggattactggcacccgccaccacgcccagctaattttttgtctttttagtagagatggggtttcatcatgttggccaggttggtctcaaactcctgacctcaggtgatccacccatcttggcctcccaaagtcctgggattacagacatgagccatcatgcccagccaaaacaaggattttatattcaatcaaactgacattcagatatgatcacatgaaataaatatcaacgtacaataactcagggcatattttcacattattttcctgtagaatctgctagagaacaagtttcagatacccaaaatacctagagaaaaactgatataaggatgggtaatgagcattaaggagaaacataaaaactaagactcaacgatggtaaaaagtatgataatatagtattccacagctacatgctgtgacaataaagagattctgtaactgtcaggcctctgagcccaagctaaaccatcccctgtgacctgcacgtattcgcccagatggcccgaagcaagtgaagaatcacaaaagaagtgaaaatggcctgttcctgccttaactgatgacattccaccacaaaagaagtgaaaatggccggtccttgccttaagtgatgacattatcttgtgaaattccttcttctggctcatcctggctcaaaaactcccccactgagcaccctgtgacccccacccctgccccccagagaacaaccccctttgactgcaattttcctttacctacccgaatcttacaaaatggccctaccccatctccctttcctgactctttttcggactcagcctgcctgcacccaggtgaaataaacagccttgttgtgacagtaactttaatggggaagaatgagaagaagatgtgggtaaagaaacaactgtttttctattaatggtggtagtattagtgtgtaattctgagcctggtgcataagtaatatggtgtaacataagtgaatagttgtgtgatattttaattcaatcatcccatgtatttgagaatcagaattttgatgtggtaaaagaagattcacatgtaacatataatctattaaaaagataccctgtagtcatgagtttgacttttaggtatcatttctcagtataacatattgttgtagatttcagataacattttttccccataaatactgtccgctgcaggcctaaaaataatgaaaaggcctaaaagaccaactcagtagcggtaaacaccagtactgcacctagattatggtctttaggaaccattttccagtaaaagataccagtaatctttggaaagcaggatttttttttctttttttttttttttgagatagagtctagcttcgtcgcccaggctggagtgcagtggtgcgatcttggctcactgcaacctctgcctcctgagttcaagccattctctgcctcagcctaccgagtagctgggattacaggtgcctgccaccactactggctaatttttttttgtatttttagtagagacggaatttgaccaccttggccagtctggtcttgaactcctgacctcgtgatccacccgcctcagcctcccaaagtactgagattacaggcatgagccaccacaacccggcggaaagcaggaaattttttaaaagctattttaattcagtcatgtaaaaaaaatgagcagaaagaaacaaaaaacttaaaaaaaaacttaaaaaatgagcagaatcttaggaatcacctgcgactttggttattcatgcttagccatttctataggaaattccagcactatttgagttagaccactaattatatgtgtgttgtagctttctccaagagataatggaattcacaaatcaaaactttgagattattaagtgttacaagtgaattataaccccagtcatttgctttcaaatgaacagctaaacatattttgtgttaatttcttatggatgctgctttgtttgtttgtttgtttattgagacggaatttcactcctgtcacctaggctgaagtgcaatggtgagatctcggctcactgcaacctctgcctcccgggttcaagtgattctcctgcctcagcctcccgagtagctgggattacaggcgtgcaccaccacacctagcagatttttgtatttttaatagagacagggtttcaccatgttggccaggctggtttcgaacttctgacctcaggtgatccacccaccttggtctcccaaaatgctgggattacaggcgtgagccaccattcccggcctagataggcttttagttggtttccatatacagtgtatatagggagaaacagactaagacagacactggcatccacagaagtaaaaataaaaagtaaggtataatttaaatttcacacggtcatggtcacatttttcagctttttgcacctatgttgtataaaaaagacaaaaatgcctttagaggctcaagttttcaggacttcctgaagctgtgtcatagtttaaaaatgccataaaaatgccgtcagatttaataacgtatcagctgaacactggatttctgttatgttgagtcttcaaaaatttctccctgtatgaggaattaatactgttatgtctgatctggtggtctgaaatgtgaacttttctgggccaaccagtaaacagctgctgttgctttatagctgcgtaattcagtcttggaaattattagataattcccacaccatttcagcttgctgttttaccataaatttaatgtgaacagtatttctagctaacctcaagctgtgtttattgtcgtggaattttctcttttattctgaggtaaatgattacaaatggttatgatgaggaatcaaagaagaaagtggactttcttcaaagttctttttctactctagccgcttctgagcatctttctcaagcactgtgtttccatcagtccctaccccaagcagagaaaggaaacagttttcccctttgtcttcagaaccctcttctcatcgtgtcattttccaaagcaaataaaaatcttgagatattgtcttgagtttgattttttttttttttttttgagatggagtttcactctttgttgcccaggctggagtgcaatggcacaatctcagctcaccccaacctccgcctcctgggttcaagtgattctcctgcctaagcctgccaagtagctgggattacaggcatgtgccaccatgcccagctatttttctgtttttagtagagacggggtttctccgtgttggtcaggctggtctcgagctcccgacctcaggtgatccgcgcctcggcctcccaaagtgctgggattacaggcgtgagccaccacaccctgccgagtttgatgttttttttaaccattcaagccagtaaataactttccagacagctgtagtagaaaacagaatttgtgtgtgacaaaacttaagattttgggattgagagctctatggtttatgccatgtggataattgtagccagatgaagaatatgaaatttaaggaagtgtttagagtggtacagacagctattattacgattcttggggtagaagagtagcttacatacaacataaaataatggcattaactgaattaacttcagcctttgccatgaaacccaagctttcattatgttttaaataatgaactacattaaaaatagtatataaatatgtaaaatatattagacatagacttctcataataaattatgggaacttttgatgtatttcttccctaggaaaagaactaaacaagtgcttctttgtggacttaaaatttttcagtttactattgtgaattaggtacagcatatctttataattccagataatacccataaaagcagaactgtttatttacttattatgaagggaatactgaaatgaaattaaggacaatttttttctcacgtattatatttttaaaaagttatttgatgtttgtgattaaataaagaatgaatttttaaagccagttctcaattagcactgaggaaaagaatatgctttttttcaggtacacaaataagcatcatggatataagaaacgacataaagatgaatctacagtctggattaagacgtattttaatttcagtgtcaaaggctgttaggaaatattcagattttagtacttgacaaagaaggttctcaatatttgtttcagtgttcagtgaaaggataaattctgtcgtctttctcttttatcatattagtcactgagtggtttcattaaacattccctcttccatatcccctgataaatttcaacttgttggtgatgcatcccaggagtgtctgtctttttttttttttttttttccttctcctgtcagtgagtcttaggctttggctttgaaaccctatagtgaagggaaatctcaggcaacagctgtgcaaccgtctggagagcagctagtccagattggaggagacgaacgaggctggtcgcaggagagaggcctccaggaaaaaatggcattgatgcattacctgcgttaaagattttcctgtacttagcatgcttcttagggttctactggagcgtttgggaaagatacagtattgatggatgcatagaaaatgaggcaaattttttaaatggggcaaatattaactgtagacaaagaaaagccaaaagtacaaaataacagcgttgtaagatacgaagataaaaatacgcctaagtatgagcgttctggcagactcacaatacagatgccatatatggggtaaaaccataccagtaggatggtgggaagggaaaggggtgggctcatgttccatagtgggaagacctacagcggaaaaatcaggagaatagttatttaagcacagagtttagggagtaagttgcagaagagacaactaaatgagatggccgtgaatgatttttatgacctcctcttgttatggagaaatcgatcaaggaggcctatatttgatggcaggaagaagttgagtttaaggtttccagacatttgttttaatctggaaaatttctttttttctttctttcttttttttttttttttgagacagagtctcactctgtcgcccaggctggagcgcagtggcgcagtcttggctcatcgcagcctccgcctcctgggttcacgccattctcctgtctcagcctcttgagtagctgggactacaggcgcccacaaccacgcccggctaattttttgtatttttagtggagactgggtttcatcgtgttagccaggatggtctccatctcctgatctcgtgatccgcccacctcggcctcccaaagtgccgggattacaggcgtgagccactgcgcccagcctaaaatttcttttaagcttagaagttgcaagtcaagttactgttaaaggcgtcctaactttgaattagataaagctaaactgtggtttaattgagctgagtttgttgtatgctatatctcaacttcacaagatgtttgctttttcttggctataacctaagattatacaaatataaaattacctttatgcccatttgatagactttagggctgaatttccctgtgtaagatgttgtagaggtttgtacttgtgattgtttttactctagaagcatgtttatcttcactcctttagtgacacgtgtttgttcaggaacttcaaactcaatgtgatcaaaactagactcatgttccctgaatagtctctcctgactacaaatctgttggaaacttccaatcctaattaataattgtaaactttttaatgtaagtcatatgaggggttgttgtgagcataggaggtagggagatggtagtgtgagctggagcatatggtaaaagttgtttgaaagaaagtagacccatgatgtggatcctgagggatacgtaaagaaaatgaagaggtgtagatttaaaaatgtttatggggcctgggcgtggtagctcacacctgtaatcccagcactttgggaggccgaggtgggcagatcacctgaggttaggagttggagaccagcctggccaacatagtgaaaccccgtctctactaaaagtacaaaaattagccaggcatggtgatgggcgcctgtaatcccagctactcaggaggctgaggcaggagaatcacttgaaaccgggaagcggagattgcagtgagccgagatcgcgccactgcacgccagcctggatgacaagagcgaaactccgtctcaaaaaaaattaaacaataaataaataaatatattcatggggatgttccagggaaagtagtttgtgttggtagccttgagaaataataatagaaaattagaatagaactaagttggttcattaaagttggaacacttgtagagatttttgatttggacagacattaattcatttgattatttctcttattcgatgtccagaaaaatatctgtacattcaatgtggttttatttgtactgcacatgtcattaataggctaaagttacctctaagatacctgctttcttagtccttgttacgctgtaaattctgggcatcaggatatagctttttattatgttagctcttttaatagatgatacaattggattggggaaaaaactgattatactctggagtaatactttcatagcctgtagtatcctgcaaatagctcctggtcatcttcgaattttactagcaaacttgtagggtaataggttgggacaaagtattataatcagtggctttgagggcctgataagaggaaacaataattgtgcagctatattgtgaataagtagtgcatgatgctgatggttaaccctttcctgcggtgctcaaacattgggaaataattgctttttgttcaaaatgtaagctcttcgataattgagacttttgtcaattcactgaaatattcccagagcttgaacatgtctggtacatagtacatatttaataaatatatagatttaatgaatgaattgaggatgtagccaaatattggaaaaggaaagggaaaagaaagaatagcccaaacattagaaagacagaagatgtggagcagcaatttcacatgcctaaaagaatttctgagattatggcaaaatcatttactttacttactccttattgatcaacaaaggaagagcaggttttatgtaacaaccaagaagtaacatagggatctcagaagagaagaaaccaagtgtctttggatcttaataaaaagaacattcaactccagaaatagggttaaacctatcctacacatgtctagtaaaaagtcagtgtatcagaggcatctgtgtttagagataaaacataccattagattcatttataatagtttcattgtccttagtttttaaggctaatgataaagatttttttttttttgtgagacacagtctctctgtcacccaggctggagtgcagtgacgcaatctctgctcactgcaacctccgcctcccgggttcaagcgattctcttgcctcagccacccaagtagctaggactacaggcacacgccatcatgcctggctaatttttgtatttttagtagagagggggtttcaccatgttgcccacgatggtctcgatctcctgacctcaacagatctgcccgcctcggcctagtgctggaattacaggcgtgagccaccacgcctggccttaagaattaattttcacagaaatctgcttctaaatattattcagtgataatagattttagaaatttcagattcttatgttgtaccttaaaggttaggatactatttataaatgctaaacatgaactcctgtcatcctattttaatgtctttattaagtgattacatgaatgtggcgtttcagtaggtgtttggtgtattaatagatgtaggtactcccctcttaaacctttaagtattttcatgccatgaaaaatttggggggcattctctttatttattgattaggtacctgtattttcaagaatattactcagcttcagttcccccaaatcttttttagtgttaactaccttccgagaacgtggtataacattttaaaatatattttttgaaggtttggatgtcactgaagatccccctatttattggatggtatctttatcagctgggaagataattagtttcccaatgttgctatatttttatgaataggtcctgtagctcttgctttcttgaaagcttagaattgattgtaagccatggactaatgatattctccaagcatatttaacatgaataggctcatgttcagtatgtcaagaagttaccctgttgtactatttaaataatttgagcttagttttctttttccacctttgttctaaattcttaggtgagtctgaattcctgggcatctgtgcacacagcttcttcagtaggtcctttactctcattgtatctgatctttgacttcataaagacccttggcctactgaccctgtatttaatttcacatctcaatagtatttagccttctcatatttttcctcttctttagagctccctgatccctcactccagtcattcaactctgtgtattcctttaacttccaccctcgctctgtctcttcacagatatgcttctttatatggtagtcagaagttcctgtgtgatcttcgtaacctccagttccctccacagtcacctgttatcaggcatctgttccttgagctccagggaatgagctctttgctatcattctggttgtcggactcactgggcactgttgtgtcctccacagtctctcagtggcatcggttgatgggtgcattctccccacactgatgtcattctgctgcttctgattttctttctgctgtcctccattttcctttcaggctcccttccccgtcctccccgcgccaccttttgcaatatttaggattcagaaattccaaatattgcaaaatatttagaatcagaattcagaaattctaaatatcagtgtttaataggagtaccctggggttgtccattttctcacacaacacatacttgctaggagatctcataagtgcagtggtttttcagaggcctgcattgatgattcctgagtcattatgtccaggccaggcctcatacatactatttactggttctctttctgcgggtgctccaccaagaattcagactcaatggaatatttcttctaagatgtacaccagttccttatcaaaaaatggcaaattcagacttcttaggttaaacagagaactcgtgaacatggcatatgtctgttattccatttttctctgttggcttattgctgagtaccatttgggataaaaatctgtttcaggcaaaggataggattgttttcagcttttattaaattctcctagacccttgattttatgcagagaactaattaaatttgaatgaatttaatgtagaaaccctgctattgatgcagaaatcaacctgattctggactagcaccagaatcaactatttttgttgtttttgctttctttttttttgcttttgctttctctgccggtaaataacaactagtatgtaagaatcaaatgaatcaagcataaatccctaggaaatatttatgcattcatttttaacaatttaaagatgtgaagatatataattaagcataatcctctcaaagtttgacgttgaaaagtatttcagatacttcaacttaaatatattttttgcaaaatatcttttttaaaaaaacagatgtggtctcagcaatgtaattattacagtgtgaggagagcttacagttgtaccaaaatttataactaggaagaagagaatgtgaaataatccggaaacctacaaaactgtcctatacaggaataccaattaaacagctactaaaaatgagtgtaaaatgacaatatggctttatcaagtgcttagggtctggaaaaatgcacatattgcctgttatttattgttatacttaatgaatgttcttttgcacgtgagaactgttataaaagatgtcttttgtacatacttggtacaccagttggctttttaacccattagctgttttcccccaaaggtggcctactctagatgacgttaaaaatacacattttccagggacttatataaatagtcaactgccctattatggaaacttaaaagcgaaggccctgaaatatccagacagtttgaacataaaccaaaaatgaagtgaatctctagaattgctgtgtaatagcgtgagtggggagggggtccctcaagagagggaactgacctttttcttcctcgtgggtgaccttgagtacacactttatttagtcattaaaagggtcacctgaagcttagagaatgaagatcctacagcctgttaattttatcattgttagaaactctctgcctttggcctgaaaatggtaaatcacctttcttagaagattctcatatccagatattcttaccaaatcagaatcttttccagcattttcttcaaaaaaccacagttctgggttaaaacacagcagatcctaactgtaattttcctttcatgtacattttagtcatctttataattttaaatgaaagacaggaactacattatttgaaataagggttaaccccctctaattataagcattaatcacacacagttttctcatttctaaatgttaaatataaaatgggagctatctcttcagacacttttctgttgccttctgtgtgcggcaggaccttacttttaagcttagtttgatttaaaggctgagtttctgcttgcttggaatgcttgctcttcaaaatatttgctccctggagagggaaactgaagatggagctttcacgtgactttggattgctgacctggaagacgtttggggtaataggatgggctagggcatggttccactgctttctgtttgagtggggtcaggaaaggaaggcggggctcgctgtgtgcaaacaggaaaacatagtctgaagatgtttgaagcctgagtgcactttcatttgatgccttgctttattgcttaagagaattttaaactgccgaatccgcaaatgtgctgcagcctataatgacacatatttaaatgatttttgcatctaaacaaatgcattcactctttgcctggtgtgtacaatttgaatgacactcgtgctctgcctggaaggaacagacgtttttcattataaaattcagtcaagcagaaaagtagcaaaggaagcagaaatttccatttacatctatgattgaagttgtagtgataaaagaggatgactaagttgaagagtagccttgttctcattctgctatctgacatgggatcttgtcactttggtaatagtttttaaacttacattattgaggaaggctctgatcagaagtctcaaattatacatgttcttcaaccttagatttttctgggtgttttgtttcaaaagtctcaaattatatatgttcttcaaccttagatttttctgggtgttttgtttggttttttggttatctatagatagatttgagtatctctttttttcttaaaatccgttacttactagtaataaagacttaagtggtagctttacgctccattatcacagagattcacagtactttttagtttttacttgtgagcctcagcaggtgtagacagataccttagttgccactgataacatccagttgccactagatcaagaaatggttcaaaattctccaggggcattttctgctaaagaagagttggtgatcttccttttggaagccttaatgtacttaaaccttcttccttagaagtccagaaattcaattatttcagctctctgtggagtgataagtcctgccaaattgatttacaataatgaaactaagccttgtttacaaatctaagtggtgatttctaagtccacagaggcgtggtaacagagagagagattctgatttatctgggggtctatccgtgtttgaacagattgtgtgatttttgaaacatgattcaaaagggatgttgataaattctaaaatacatttttattgaagagcttgatgaatcatgtatacttactttatttgttattctattagatattgtcttcctcatccctaggtggtgttgctagtacagtgacagaattcaaatccttctttttcctctgctctaacagagctttgtgaactcatagcaatattgtaatgcctggtaaaaggtggtgccagtttcaagtactatatcctaattacttcatggctaactcttgttattgttaacaatattgttaactcttttgttaaatgcagtgacatcttttttctttctcattctctgtgtactttttgccctaaatagttctgcatcttttaagatacaagtttgctttttcttggaggtttttatttggaaaatgcctgaaatatatagaccaacatttgttcctccaatggttaaattacattgtctcccaaagtgaggcattttaagtctggactatacccaggagaatctaaaagaggcagttaataagctcttgaagagcacagtggggtggttgtgtatttattgagtctcacacttaggagagaaataggctggaccaaatgagcctgggcatcaaaagcatgtgggtggtcgttggtgatatgtgcagtgatgagtgtgtgtgctgagggtcctagaccaggctggcagggaaatgaactgaaggcagtgaagcctcccctgataactgcagagagtgctgcagcatccaggacctcaggatcatgatgaacaagctgtagtggatggaagggagaggaactatgggaaggatgagtttctggccagaaagtggtttactggagtgctgtgtctgagtattacatgatctgaggaccatgaggtccagctttgggagtatggagagtttgagtggagtagagttatagtcccatggtcttctgattcacagacattcatgagcgataagtatctattgagaaagtggaagcatgatttttatgacctcctcttgttgtggggaaatcgatcaacggggcctatattggttgggttctacaaccaaatagaatgtgttcagcaggagtcatgttttgggctcctcacaatgttcagtgttagttctgttcctttctcttgcttccacataggaaagactttgacccaatgaggaattagtcattgtcctttgggtacacttccggaatttgataatcagttgggcacttgattctagtacatttgctaaaagtaattaataccctgcaattggaagcatgcagcaagcgactgggaatgctaagtgaaaggtcagaattgaaagagtggaggaggctgttgacccttaggcatggatgatatgtctgagtgagaaagcaagaagagtagaagacagagccttactttataatcagaattatgaaaagaggagccaatgagagggaaagaatgattggcttgagatagattggtggaaactggagaagattgaatttaaagaagaaaagtgggccaagttcagtggcccatgcctagaatcccagcaaattgggaggctgaagctaggagagttgcttgaggccaggagtttgagatcagcttgggcaacgtggcgagacccctgtctctacaaaaaataattaaaaaaaaaattagccaggcatgttggcatgtgccggtagtcccggctacttggaaggctgagacaggaaggttgtctgagcccaggaggctgcagtgagctatgatcacagcactgcactccagcctggttgacagagggtatccccgtctctttaaaaaaaaaaaaaaaaagagaatgtggcagagtagtcagagaactggagggctgagaagagactgatggcatttgttgttcttgaccttgaaagaagagttgcagattgttggagcaaggccagatggtaataggttggaaagaacaagtgaggggcgtgagagtgacagtctacaaccccgttaagaagttatctgtgaaaatgcctcttcctgtcttgattatagcctccctcgcacatggctttctgagtatggtatgtgaaaacagcatgctgtatatttttaccttcccatatgagttaaggttttggtaatgacttgtggttcttttgcctcacggaacaccaacctggttggtattttgtcggcaattatgtggtttttaaaaagccccgtatataaccttaattaattgcgtctctaaaatctatcaggctttgagttttttgttttttttttttaaataaggcagaaagaaaggaaagtgttaggagaaagcaaccagtgagaatacctatattttgaagaaacaaagtagggaatttagaattatctctactatatctgctttttcagctcatctctcgggatacagaggactgaactaagctaaagtaggttcaagtctaaaggaaaccttaaattaatttctgtattagaattaatcacacacctataaatacaatttatgatatgagaactgcaacaagagaaatggggggagatgagcagtttgctgatcaatagggttaatgatggtaacatagaatcctagtgatatgcctcccattgactaaaatgtatgcgttaagatagcatagcgcataaaatggtgtactgcagtctcagtgtattcaagcttattatggtttctctgcctaggtttgtgtctttggctttagattttctcccataaccccaacctgtccacattcaagtcactactccttgaaatatattattgatctctaaaatctgatgctaagtctgtcttgcccaacggtggccactagccacccatggccattgaatatttgaaacctggctagtccaaactatgctgtgagtataaaaaacccaccagatattaaaaagttagtctgggagaaaaaaacaaatgtagaatgtcttaatgataattatttacattgattgcatgttgaaatgatgaaatttaggatgtactgggttaaaatatattaataaaattaattttacctgtttctttttacctttttatgttaatgtggctacaggaaattttaaattagatatgtggcctctattatatttctgtgagacaaagctgctccaagctgttttggtccagaactatatctcggttcttttgtatcctacatggacctgcatagaatggtatttagtaatactcagcagtagcagagatgatctcttatcaaattatgttaagttttaatttttattcttgtctctcaccctatgtgcacctctctggccaggaggcatttatcatatcaccttttaatatttggaaatcacttgatctgcttgagtcattgtgttgttttcaaatctagaactctttctaccttattttgtaacttctataattaaacaaaaggcgaaccaggagcagcttggctcttagggatgtgtgaaaaggcgctcagtccttaagttggtgccaaaagtgacaaatctataggatgagatgcaggtttatggaagagaagcatgaaaatttttattttttaaaaggacacagcaagctagtcaccaaaagacagatacttgattctacttatatgcggtacctttttgaatttgaagagtcaaattcaaaaagatggaaaacagaatggtggtttccaggttctggaggtgggggaatggggagtggaggtgggggaatggggagtggaggtgggggaatggggagttgtttaatggtgtgcagggttttagtttagcaagatgaaaacagttctggagatggaaggtagtgatggttgtacaacgatatgaatctacttaacactaaactgtataattaaaagtgggtaagcaaagagtgtcttacaaagcaataacttgtaacttaaaatttttaaaaaccttaatgagattagttgtaatgggttatcttaagtagacccttactgccggaaggaacagctgaatcacatcacttgggagcttgttagaaaagcagactcagtcccaccctagacttgtccaatcaaaacctgcattttaacaaggcccccaggtgattcataggcactgtaaagcttgagaagccctgctccaaatatcatttctcaaagtgtgatccatgagccacctgaagcagagccaccctgggaaggtctgttttcaggcgcgtcccagaacacgtaaatcagatctaggctgtggagctagggagaagatgaatctgcagactgatcaggatcccaggtgattttgaagcatggtttgagtttgaaaacccctaatctggaaagctttaacaactattactcttacaattccatcttttaacgaatgttggaattattaaatacttgtaacaagaagtcctgttattgataaaatcaagatatgactaatagtgcagtcaaaaagaggcaacaaaaaagcacctataacttatcttgggttggttaatgaggaagctgtcattcaaaattagtaagactactgtaacatttcttggggtcctgaacattggaatgagagtcggttttcagagttgagcccacctctgtcattagctttgtgcaaacctcatcaggctcaagattcctcatttgtaaaggggaatgaattctctgaccagttagtttacattcctaagacaaggttaaatttggaaagcaaagaattttcggtatatatgtgataattttgaaattcttgaatttttaaaaaatttaaatgccacattacttatatttttttctaaaaaaaagtcaaaccaagcgctgtctagttattaatagataccacagatgagatgcctgagttggtaagctctttttaattctagttcttttcaactacaataattttatagacttttttttgaaggctagaatgttgatgtggaatcaaataggtatgcctctatgtatggtagatgcacctgacagggatcacttgacttgaacatgccctgacaatgatcctgtgtggcaggtgcacctgattctgagttctgagttaagaaatccgggagtgggccgggcggggtggccggtgcctgtaatcccagcactttgggaggccgaggcaggtggatcatttgaggtcggaagtccaagaccagcctggccaatgtggcaaaaccccgtctctactaaaaatacaaaaaccagctgggcgtggtggcgcaggcctgtagtcccagctactttggaggctgaggcaggagaattgcttgaacccgggaggtggaggttgcagtgagccaagatcacgccagtgcactccagcctgggcgacagaatgagactctgtttcaaacaacagcaacaacaaaacccaaaacaaaaaaacaacaacaaagaaatccaggagtggctaacccagagagccattccttatctgtaaggaacatctgagccctcatctccttctgtggaacatgggcctcgccggggattgagaccctttgttatgagttaagtggaagttgccaggtggagattgttagggggagggtgttaaatgagaatgctgtagagaccacatgccttttgcaagcggctgcggttcctctgtccaacccaccaccactggactctctaccctgtatgcaagcccccagtaaaaccctatgagacatacggttcactagctctgggcctcttctggctcttgaacctggtgccatccacattgcagtcagtaggagtttggcatgacaccttattatgtgaacttttatatcaagccattaaatttttttaaaatagactttatattttacaacagttttaaatttacaggaaaattgagaggatagtccagagagttcccataggctttgcatccagttttccctattgttaacatcttatattaatatggtacatttgttgcagtcagtaaaccaattttgatacatggttattaactaaagtctatactttattcagatgtccttagtttttgtctaatgtcctttctgtgttccaggatgccatccaggaaggcgcattatatttaattgtcaggtctccatagcctcctttcctcttggctatgacagtttctttatacttctctagttttttaataaccttaaaggttttgtattggtcagataatttgtaggattcccctctgtgggaattttctcatgctttgcctggggttattggttttaagaaggaagaccacagaggtaaaatgcccatttcatcacatcatatcaagggtacgtgtttatcaacatgatacagccctgttggcattgaccttgatcacctggctcaggtggtggttgttgagtttctccacttgaaaattactcttcttcccactttatgtgctctactctttggaaggaagtcagtttgcacagcccacaattaaggagcagagaattatgcttcattttcttgagggcagagtatctacataaattatttggaattcttctgcgcaggagatttgtctcttttttcctatttatgtattcattcattcagtcatttagactcatggatatttacattgtactttgatttctaatccagcactacttcataatttttattgctcaaattattccggctttagctattagaagccctttcacttggttcctatgctcatttgacatagcctcttttttttttttcttacaagatgctgcagtctcatcttgcatattttcagccctaatcctagaatcagctgttcctccaaggagcccttgttccttttattggagagtaatgttattggagaatagtattaaaatctggatgttaaggatgctcgttgccactggagtttctttgcttttaagacttctcagttgatagagcaaggcaatgtatttgtccatgttcacccttatgttatgcagatctataaatatttctatagctaactagttgtatttatattaagctataatatctagtctatattaagctaaatacaagttcatccggatgtttcctactctaacgtattaccacatggacactatatctctcctccttggttatgtataaattctcactccatccaccatctatgtacttaattgttcagtttcagtatatgtgcgtagccgtatcagaattgttaacccaggctgggtacagtggctcatgcctgtaatcccaatactttgggaggctgaggcaggtggattgcttgagcccaggaatttgagaccagcctgggcaacatggcataaccccatgtctactaaaaatacaaaaaaattgctggtcatggtagcatgtgcctgtagtcccagctacccgagaagctgaggtgggaggatcacctgagcccaggaagtcaaggctgcagtgagctgtgatcgtgccattgcactccagcctgggagacagagtaagactctttcttaaaaaaataaaaaataaaaaatataaaaaaatttgttaacccacacctatatggatctttttaaaagctgcaagactgctaacaaatatttatttatttatttatttatttatttatttgagacagagtctccctctgtcacccaggctggagtgcaatgacacaatctcagcccactgcaacctctgcttccccggctcaggcgattctcctgccccagcctcccgagtagctaagattacaggcacccgccaccatgcccagctaattttgtatttttagtagagacggggtttcaccatgttagccaggctggtctcgaactcctgacctcaggtgatccacttgcctcggcctcccaaattgctgggattataggtgtgagccaccatgcctggccataaatacttattttgttcccgtggttttttttttcttttctcttttttaaagtaaatcctttgcactatttttattattttaagaccagtgttattcagagcctgggttaaacactattctgtgtgtgtgtgtgtgtgtgtgtgtgtgtttgtttgtttgtttgttttttgagacagagtctcgctctgtcacccatgctggagtgcagtggtgtgatcttggctcactgcaacctccgcctccctggttcgggagattcttcggcctcagcctcccgagtagctgggactataggtgcgcgccaacatgctcagctaatttttgtatttttagtagagacggagtgtcaccatattggccaggctggtttcaaactcctgaccttgtgatccacctcggcctcccaaagtgctgggattacaggcatgagccaccactcccggccagcactattctgtcttatactcactctgccatctgtgtgtgtatatggtacgtatgtgaggctggatctgtgcacttggaaaagttggagagatgatttaggtaaaacttttagttttcacttcttttgcctttttgcttatcttgatccatttagttcctaccatctggcaaatagttctcatctgaagaatcccatctgtcagttctcactattatccggtaatagttacagtgaaatgctggtgacggcaacagccactttttaaaaggatgtgtaattcaccctcatgtcctctttgagaacccagtaactgcccacactctgaagctaaaaccataacagttttatcacatggaaagtttgttgagaaatgtttggctgtttctgtgaagtaatcgtcccgtctcttgagtacagatgcctcccaggaaaattttcccagcctatttgttaatgtgaaagttacaaaagatagcatataatgagcacattcaagacaaaaaaatttgtggagtaagagtctgaaatggtaaaataaaaaatcacttaagaaaacatttatctgtagctgtcattttcatatacacatatctagtgtatacaagttagtaagtacataattctcaaaagttctacctgtctacacatctacacagaaaaattaggaaagtcttgtccagacttttccatcatcttcagtataaagcatcttctagctgttggaatagaaacaagctagattcttgactcctttctatttgattatttagatctgaccttcagacgacatccagaatctgagaacacgcaccacctctactgctctcatcctggtccaagtcattgtcatctcccacctggattaatgccagagcccccttcctggtcttctcacttctagtcttgaccccctagggcaagaataattagcttagaaaaccaccccagagccttccagcattactctgagtactggccagagttggacaatgtttaaggccccgtgcagtcagctgtccctgtcctgtcctggctgtcactcactcgcttgcccactgatctcttccacatcattcctccacgacagcactgatctccttgttcttctgtgagttcaccaggcatgcatctgcctcaagactttgtgtaatacttgttgcttcctctggctagaatattcttccctttgattctgaatactttgttccctcacttcctcaagtcttcactgaaatgtcatattttcaagtaggcattccctgaccaccctatttaaaatttcacccctcagaaaaaacaaacaaaccacccctttctctgctttatctatgtaacatttattaccatccaacagacactgtatttttatctgtattttttatcgcttccccgctaggatcatatatcgttttatctgttttgttcactgctgtattcttagcactgagacataattgtaagtatgcagtgaagagttagtggataaaggacagtggctgcaagaggggatttaggaaacaccccctcccagccaggaccagcactcggtgcaagagttgaaagagttgatcactcagattctctgcttctccagtcgtagggactccaccccgctgtgttgattgctgtcatgtattcaccccatcataagcagtactcacatgtaaaacagtaccatgtcatctctgtggggctacaagtaggtggtgatggtgcaatgaacatataaaaccccagtgtcttcagtaggtgcgaaataggtgattagtgaatgatgaagagtagctgttgctgttttgattactatgattattattatgagaaactactgtggttgatgagatagatactggggagaaggatactattaatataatttattgagcaactttgttctgggcactagttgagtactttagggatattaattcatttaattctcccagttctgccatttactctctatgtgacctggactgttacatagtctctcagtctcaccctctctttttttttttttttttttttttttttttttttgagacggagtctcgctctttcgctcagtctggactgcagtggtgctatcttggctcactgcaacctccacctcccaggttcaagcgattctcctgcctcagcctactgagtagctgggattacaggcatgcaccaccacgcctggctaatttttttgtatttttagtagagacggggtttcaccatattagccagactggtctcgaactcctgaccttgtgatccacccgtctcggcctcccaaagtgctgggattacagacttgagccactgtgcccggcccttgccttctcttataaagtgaaatcattgtagctgctttggtgtggttctgaggacggtgagagaagacgcacgtgaagtattgagggtggtggcaggcacacagttcagagttactaacaatactggtgttttatcttcacaaggcagatctgggcccatagcacaaggaaaccgaggctttggcattttacagtaattacattgccagaacatttcccccactttcttgaatcatctttacctcttgagagatgaggaagagagggcacacctcgggcagaagtccaaagacctcaggcatttttggcctttcattcccatgattctggccaacatcattttagtccccagcagttcatagaaatattgtcttttaatctgatattcaaataatctgtgccttgaagaacctgtgtatggctctagaatcttttacattaatctactcaaccccactctgatgctcaaaacttcagcagtctgttttttttttattttaatgtctttattattatttttttttttgagacggagtctcgctctgtcgcccaggctggagtgcagtggcgcgatctcggctcactgcaagctccgcctcccgggttcacgccattctcctgcctcagcctcccgagtagctgggactacaggcgcccgctaccacgcccggctaattttttgtatttttagtagagacggggtttcaccgtgttagccaggatggtctcgatctcctgaccttgtgatccgcccgcctcggcctcccaaagtgctgggattacaggcgtgagccaccgcgcccggcctaatgtctttattttaaacatttatttttagaggtagggtctctctaagttatgcaggctggcctcaaattcctgggctcaagtgatcctcccaccacagcctcccaagtagctgggatgacacccccaggtgccgccatcctggcagcagagtcagttttgatacatctttcccttctcattcttcccaatgtcatggattgggaagttactgtggttttagttgcagtactttttactctgaattctgtttgcttcctggaattctgtctgtcttttgaaaagacaacataaagaaatcgaaaaatatactttaaattccatagtgtgggagcctctgctactcgcctgtttgatattcattcccattttttcctttctaaaagaattccagattttttttgttcagggtgacaatgtgctctgctgaaaatactttcacagattcccttgcaggtgcatgtgaccagatcacagtaatggcacatatggcctcagtggaatttgctgaggagtatgtccctcccaagtaacagcaaagctttattagaggaaaaaacaacaacagaaaacctttcacctttgtcttgtttctcctgccttctgtctggaacttggacacagagtcttgaatttctgtgaccataaaacacgaggataaaaccaacgtgctcaggatggcagtacagaaagataggaatacgctggtccctgatggcatcatggaatatctgcagtggccctagcttcagtgtcacttcttaggtgagatacataatcctaccgtgtgtttaagccacggtttgacatgtggtctattctctgccgctgactgcattcccagctgttctatatggcttgctagctaatttaagtctagttttattgtcaaattgaccacattgtagattataatattaaagtacttcacagtctaaaagtgaactacttttgtaaaagccaaaggaaatgggccaaatgaaccattttgaacagagtttaaatgagtgagttgagttaccactcttggatggagaactggagacctggattttcagtctagttcttctgccagttggctctgtgggcaagtcacttgacctgagctcttttcctcccatctgcaaaatgaggtaatttgagctagacagtcctcccaaagaccaccaaagagctagcagattgaggcctgcagactcctattgaatttgccatccttgttcaccttgccaagacttcatagccaagaagccagacccagattttgttcattagctttgaaaacaccctttcagttgggtgtgtgtgtgtgtgtgtgtgtgtgtggtgtgtgacatgcgttttgaatataaattgtgaattgttttagcaagaaaccaggttgtatgtttctcaataaacatgcatactgtatattgatgaatttatccacttgaaataaatggtgccaaattgcctaaagtttgctgtaaacaggaacatgatttctcattatgatgtttaatttgttttagtctttgatctcttacatcagaattctgttaagaactctttttacctgaaagatcaaagcaaataagcagaagcatttataaaaataaggtatacgtggctgtggagagaaactccaggtatatacgatcataggctttttaaaattaataaactttgtttttaaaaacaaagcagtggaagttcacagcaagtttgagtagaaagtacagtttccatgtaactgctgtcctagcaaagatttttaagtacaatattttttaattaaaaagagaaaatataaaccgtgctaagccagttggtgaaaaaggcttcattatacttttagcactcttaacgcttattaaaagtttttaaaaacagatttttgtggttgaatcgcttacaatttctgatgtgtaaccttctaacatgtttcatcaaattttaaaagtaatgtaagcagtgctgtccactgctaaattttattttaatgttagaatacaatgaggtttctattttgccattagtcctgagagcttattaagtaaccagttttaatcctttaaaaaaccattctcattttgagggacacatatttcttagctttgtgcaatataagaagctaagaccatcttggcagtatcaaatgaaatgttttgcaagttagaaagttcagtaaccacttataaacataatgaacaattgttatagtcagtctaatgcagaaatacaggtgttgggggcaggggggtggtgggtgggcagacttggtccacaagtagtagtttgccaacctctgtcctaaacacaagttcaagaatatggttctcttggatagattttctgccagatgaaagtaagagtaacatccttagctaatgaactcctaatatccaaggcaacttttaattaattcaggcttttaagaaaagcttgtttaccaactcctcattaaaaatgttcagactggctggtcgtggtggctcatgtctgtaatcccggcactttgggaggctgaggcaggcagattgcttgagcctaggagttcgagaccagcctgggcaacatatctagaccctgtctctgcaaaaagtgaaataattagctgggcatgatggtgcacagctgtagtcccagctactcaggaggctgaggtgggaggattgcatgacccccggaggtcgaagctgcagtgagccattgatccaaccactacattccagccagggtgacagagtgagaccttgtctgaaaacaaacaaacaaaaagattaatgcagtacatgtccttttggtgaataagtaaatatgttttggtaactttagctttgcattataatctagtcgtcagcagattgactaagggcagataaaacaagatgatttggttttgtggtttggcacttactgtctgatttatgcccccaagaactcttgcaggccaaggtcgagtgtatctgatacctgctctggctcttctcacgaactgatttagtagctttgggccagcattagattttttaaactctttgacctatttgtacatgacaggcatttaatctttccagtagttacttgtcaaatagaaaagcatcacttcttagtttggacatttgcaaatatgactgagcagagctgacagatgaggtgggcatcttcaggccatagggtacttctggcctcctgtaacctagaaaattgggatgcctcagatatcaggtattcttccaagcagctagggttagtccctgacctcagaaaccctgagagccctcagaaaccctgagaaatccacctgggaatggtgtatttgttttggatgagattacctttactttccattctccaggtcttcttgtgttttttgtttttgttttgttttgttttgttttatatcattctatgtaaaagagaaatgtggtatcatttgcattatcatgttatttctttccttataatttatatcttaatgcttatctctggggctaggttataatctcctgagttaggtagccttaggtttcttggcggagattcctcccctgggaagtgaggtttataaaagaacccgtgatgtggccctgtggagctgcatggggtgtgtgctcagtactcactggtttcttccctgcaaagtgacacctgcagcctttggggtaccatgtctcataatttttgcattccctgcaacacacactatactgctatgggcatcattgatcattttaaagatttaaggaatgacaagatacagtgcttattctcccctatgatttgcttagatttttatctaaatagtacttattgaaataagtacttcagtatcatgctacatcttacatgtttgagctagaaacagactaaagtttaaacccttttatgagaatgaaaagttacttccttccccttcttagggcttttaatccctctttatgttgcatttcagaaaatgccctatagcgtactatgaaagaaagacattcattcctgtctttgctgctgtgtggacgatctgtattccttgctccgtgggagttgtgggtttatgtctattcttgcatgttttgcctgaaggaccacagtgacctacttggtggtctccctgctttcatggtttcactatgctgatctatccttcacttaattatagagtctatcttaaaaaaaaaaaaaaaaaaaaaaaaacttttggcctatgttgcttcttccaaaatggcatccaaaacctaagcctctttaaaattggagtccagcatgcttccccagtgctacttccttctggactccctttgccacttgctttctgcttccacccatatccagatgggctgcaaatatgccttgctggttctttactctgtctttgcacaggaggctccctcattttgaagggtcttttgctacccatccatccatccatttggattctataatagagttcttgatgtttgacagaactaggccaggaattgtgggggtataatggcaagcaagacagagtctatccttacgttatggaagttcaattcatttcccatgtggcatactacttctcaccattcagattcatctcgaatattgtttcttctttgaggtttttcccactgcacccaagatactggcctgacactttccttatctctattacagaatttaacttgttcattcattaacagatatttattgcctactatgtgcaagaatctgtgctaaaagctgggaatattgcagtaaacaaaaattaagtttacagcttacatataatgtggtaattatccatcttttaccttcattagactgagttcatgtaggactttatgtaatatctttatatcttcaataccagaaatgcctagaaataatttgcataatatacattttctttaaagatttaacaaaagtctgagggacagttttcagaataaactgaattaaactctctctctcttatgtgtgttatgtaaacatatatataaaatacacttttgggttttttgcttaggaagtagaaaaatgctaaaatttctgttacttacaagcagattaaaatgtccaagaaagaaaagtagggatttatattgattctgctcaaatgcttacctagacaatgtcaatatttatattttactcccctgttgtagtagaatggtaattggttctctagttaagcagcttttttaggattaattttgaagcaagaaattcagattaattaagggacaatttcacttgcagcatttaggcattattttaaccatcaaacttgaagtggcaagaaacggagttgcttaaggaggccagacgtaacattctaaaggtagtagggtcttgattgggttgcttaggcattaaaaggctgtttaacttgtcttgaagtctatctttccttgatgtcttctgcggtaagaacactgtgatacagatggaatgacgggaagtggttttcctttctttcagttggtgagtttgtaagtgatgcccttctcgttcctgacaagtgcaaattcttacaccaggagaggatggatgtttgcgaaactcatcttcactggcacaccgtcgccaaagaggtaccagcccataaattctttcttattgcaaagtgaagatttcctggggacgtgcttaatggcattttaggggtattttgaggcaacagctatgttgataagttatttaagaaaaaaacccagtgctactatccgtaacccagattttagtttttagagtgattttaggttcacagcaaaatcgaacagaaaatagagttcccgtgtaccccctgtccccacacatgcgcagcctccccatccatgaatatttttaaaaagtcaaaaatagggccagttgaactagattcattatgtgcctgtgccgtgtttcgcaacttaaaaatataagttgtctgtgccatgccttataacttaaaaatataatctctaatagttataactttaaagtttacccttcagattatttttatgcacctgttgttttcttttgtcatatacaattttttaataatttagccttttcccctgttatctattagtgaatacagtggtagaacagtgaagtagcttttttataccagcctgaaagctccagttagaattcagtttctcagttataccatccagttttatattcagcaggccatgcctaccatcttgatttttccacagggtgagtctgaccgagcacttggttaacctctgcttttggctaagccaataaaagatgtaagatacttagcatgaaaaggtcactgtgtggtaagaccaccttcacagctgctgtgtccccttgataggtttcctaataaatttatataggtttatttgtggcaagatcagtcttaggctaactagaattaggctcctttatctagctcatagtgcttcacttgagtcaattttgatcccctgtccctcaccggaacatgtctggagacattttttgttattacagcttgagggagtggtgttactggcatctgatagtgcccagaggccagagattctgctaaacatcctacagtcaacaggataaccacccgccacccccaagaattaggcagtccaaaacatcaatagtgctggggttgagaaatctgatctagcttagcttaaccattgtatcatagctttatagctgttagacagaaaataccactgaagatttagtattattttatgcctcttataaaatagtatatttggatccactgtagaataaaatgttttttatgtaaaaatgtgttttggaggtttaagagcttgctgagtttaagaaaacaaaccaaataatttgaagtccagctacctatttgataacctcattttttattccttctgtgttttcaaaagaaaaatcctttgtctctaagaaacggaaatgactcccataaggtcaaaatacagtctgtaatattttcattgtctacctttatgtcttgaattattcatccttcatttatcactagtggatgctctcagaactttatgctaatctagatttgtgcaaatttagcaaatcccagaaaagcaaaaagacattcaaggagaaatctctaatgactgtaagttctgattcttagtggctgcaggggataatttcttctcttcccaggattgttactctgaaagtgaaccaagagagtcagaatttctaggataaggcaggtccatgtgagataaacttccatctgtaagggaggtaggagtgagctggggatctacctggaatgcgcacaatttctggatacacgaattaagccagaaggcattaattctctggtatctgttcaccagtggagactgctacatcttatttcccaattagtttccattccagttgttcgtataaacctctattatataacatcgtggtcttattaaataaataataaacaagaataaaaagagtaccaaagtgtaacccatgctaaaaaaaatcctgttgtaaattcactcaaaaagcaaataatcttttcctttgtgaaattggttcctaatatattgggtctgcatgttgattattttatgtggagttttcttacaatgaaacacatctactctaccactcactgttttctccttacactttgtagacatgcagtgagaagagtaccaacttgcatgactacggcatgttgctgccctgcggaattgacaagttccgaggggtagagtttgtgtgttgcccactggctgaagaaagtgacaatgtggattctgctgatgcggaggaggatgactcggatgtctggtggggcggagcagacacagactatgcagatgggaggtaaggtggcctttgtgttcagcctcagagatgctgaaacatcttgtatggagtatttgtatcctgtaaattaatctttctgtttatcactgaaaaggtctctgcccactcccatcagagtctgctgttatgcaaaaatctgaactatgaatttttatggcatcctgttgaattaataatatcagtcacccatcacagagttaattttaactatttaatattaaacttgggatcaaaatcccactgataactatcataggttactggtagttctaacagggagttgaaataataatggcgttctgttttggtcattaatttaaaaatatttttaaatgctctctgggattgtcagtcattagtttaaggtgaattttcgttaaaggtttggtttgagattttgggcgttctctgtgtggatgtgtaagggtttttttttggccttttatcatttcttttccttcatagtggaagtcaaaggcattaataaatgcttgttaattttttttaactacctttgatttgttgattgtaaagaaacctattttcgcctctttttcttagggagcttagtcccgttacttcttacctgattctcattcttaactgaaggcaaacatctatattcaaatcataaaattataaaatgagaatctttgggttggaaatgccatctggttcaggcattgattttatgctgtctcatcccccgaagggtgatgattgtatcacttatcttattccttcagtattctcttagatgttccctagagctacagatttccaaacagcacattcaataggagttgtaagtttataatcggcaaactacaggatgcttgtttttttttcttttaatttctggtgtaatctgctactagggcccccatagagtttattgtctatatcagctagaacactgggaccacagtcataaactgaaggatccaggcaaactgggtcatatggttacccccaccaattacagtcttcagtgatgatgtcactatccaggttgatattcagttgaaatgctagccagctccttcctagttaccttcatttacatcccatttcagtacctgaacacagtcatgctttagactctgaaattccttagaaatagtaccataaggtttatagctttgatattcctctctgatcatgatcttccctcataatcacctccccagttcaggcttttagtccattatcctctttttccctgcctgcctttctaatcaggatggaatcaatggataaccattcttacctattccattgaacatccttgacttggctgaaacccttcacattttctaaacatatttttgtcaattctccatagctaggaaaaattaatttctttctttagttgcttctgggatttctaaagtatcaagtcatgtaaccttaccacttaattccatttcttattcatgctgtaacatcagctgggatcttaatgttactagatgcacctaattatctctgtcttgatgacctatcatcttccccatagcagttgatccagcccaacttcattctccttggttcccagcgtaactctctctcatgctctacagatgacccctccaccgtcatccattgtgaatttctgcaacatggtacctgacatttggtaggtgcccagtacgtgtttgttgaataaaccattgaattttctcctgtacttcagcaactcttgtaccttcttctatccctttgtttcctgtcttcccttttatgattatgttctgctggactctcaatcatctcctctccctttcttgcattttcagtctccctctcccccacacccccaggcttcatccaccctcctcccagataattctttcccatgtgttactatctttctactatgtgtttttaatcctgttgacagttggtaggaaatatttgatggtttattctacctgtagaaaagtccaaattctcttgcagggcattcagaagtctcttacatggcttcagcctgcattttcagccttatacatgtatgtgactctcctggcatcctaaaaccattgaccttttctttctctaggctttcattcccaccgttctgccccatctgaaatatttttcctttttttgtcaaatggggttaatgtatgataaagatatttgtcaactctaaagtgccacttcttatgacccgtcaaaatctatatatttataaatgttcacctgaaaagatgcagcctttacaagtctttacaggtgccttgctctgctatactacccttgctttacctttttcttataagaccataacttatcttccaattaattgtagtcatatctctttttatctgttagaatccaaactatagtttatgtgtctggtatgtcttgcacataggtcctcaataaatattagacaaagtaaattgtatattttaaattttttttcatagcttttggtaaggacttcatggtccacgattggatattgtagaaagcttatccagcccactgcccaggacgactttgaatgcggaccaacacaaattcataaactttcttaaaacattatgaaatttttttgcctttttttttctataggccctgttatagagcctcccatcttttagcaaagaactgtctaatacaaatgtaatgtgagccacatactttttcgttttctttttttaagatggagtctcgctctgtcacccaggctggagtgcagtggcgtgatctcggctcactgcaacctccacctcccgggttcaagcgattctcctgcctcagcctcctaagtagctgggattacagacatgtgccagcatgcccagctaatttttttttttttgtacttttagtagaggtggggtttcaccatgttggccgggctgatctcgaactcctgacctcgtcatccaccaacctcagcctcccaaagtgctgggattacaggcttgagccaccgtgcctggccttactttttcattttctaatagacagtttaaaaatagtaaaaagaaacaggtgaatttaattttaacaacattttatttaatccagtatatctgaaatatcatgtgaccaatatgaaaaatttaataagatagttcacattctttttttatgtttctttctttcgtaagaagtcttaacacttcttttaacatttaacagcacgtctcaattcatactagccacacactgtgtttgatagttacatgtggctggtgactactatatttggacagtgtagttcctggatgacttgaaatttcttatcactctttatttttccattaagacagacggtttgtataacctagtaatgttttctaaggctgagccactgaatttttattattgtttttaactattcttgtttttaaaatttaaaaaaattggtttggattcagtataattagtatatcaggtcacttgcaccattttattttttaacttcttttcctgtagccctgcaggcgggcagggcttctttcatgtggacaaaaccagaaaggtgttgcatcactgatccacacacaaggtgggctcctgccaactggcagcctccttgttccaggaaccagccctccttttgacacttgaaatgtaaaatcagaatagaagtttaacgtacctgacttaaaacatcttcaggggatgctacgtgacaattcttgaagaaggagaaacgagctaccattttcctggaaacaatatttgattcacagtattttgttgtttggtagttaatgaggcttgttttgatagaagatgagtgtttttctatcgctaatggggcatttagagaaacattccttgtaggatgagctctgttttatgacctcattgaaaaagaggtatgaaaaagaggtaaatctttaacataggcaaaacaggtagtgtttcagaaatttatgtgtaaattaccgagtatatttttctccagtgttgtaatggtcatattctcagatcacctcaaaatacctatttatgcagtctgtaatgtagcataatccagactgttactaacattatgtagcataatgttaataataataattacgtacataatgttaataatacacagactccagccatcgtgggtaagatttttttccatgggaaaattcatttggaaagctaacttgtaagactagccaggtaggcagcctagccctggaggcagagctgctcctcacctggaactgcagaatctgattgaacccagtggtccatgggggttgctgaattcgtaaagcaaatgaaatgttagaagaccctctaattgttgtagagtcacacttttcctcttgcagaggaggtactcacattttttttaagaaacaatctttaattatcgatgtattcttttaggtttaggtttgcagacactggtgagcgtgtgctgagaggtaacttgatgtatctttctggataattagatgattttttttttctatttctttgaacattttttttttaaagagctgcttaagatctggaggagtgattccttttgaccgtgtcttattttcattaagactgtataacttggaagagtttttttttttctttttctttttcttttttttttaagatgaagtttttgctcttgttgcccaggctggagtacagtggtgtgatcttggctcactgcaacctctgcctcctgggttcaaacgattctcctgactcagcttcccgagtaattgggattacaggtgttcaccaccacacccagctaatttttgtatttttagtagagacagggtttcaccatgttggccaggttagttaatgttactctctggtttggggggcagtgatatgttttggcttttttcccacccagatctcttcttgaattcccatgtgttgtggaagggactcggtgggaggcaattgaatcatgggggcaagtctttcccatgctgttcctgtgaagtgaataagtctcacgagatctgatggttttaaaaagaggggttcccctgcacaagttctctctctttgcctgctgccatacatgtaagacatgacttgctcctccttgccttccaccgtgattgtgaggcttccccagccatgtggaactgtaagtccagttaaacctctttcttctgtaaattacccagtctcaggtatgcctttatcggcaacatgcaaatgaactaatacagctcggggtggcttgtgtgggtgcgtatggccatgtatgcaggtgtgcgtgcattggaatatacaattccgtattgaacccagtttaaacttcatcagttctggtgattgctggagtgtcacatatggcaagacgtcaccttgccctctaactacaccagaaaaccaggccagcaccattgactatctagatacagtgggccgtttatattattattgtttcatatttttagattatttggtaaacaatttacagaactaagaataaaggaatagtgagaaataactattagcaattttaataagagttaacatagtaaatattttaattttacgaagaatttaaatatggtaaacccacatgtttattctgtattttcccagttttgaaggtatggatttctgaaatgagcattatcctttggaatgcagctagctgctaatcacctgccatgcacgaacctgaaatatatccgtcttacaaatactggttctacatttcaaatacatctctattaggttcatcatatttcttggtcttttttttttatacttgcaatttcatttaattattgtaaaaatttaagatatttaaaacattgacagctcataattttattgaagagagaatatagccatcttccctcaggaataaaatgttttcaagtttggatttgtaaacagctattaaaatgatcaagccagtctttttttccccctttttttctgcattatctcttctaatcaccttagagagattcctgccttgggcatttgtccacttcctaatggtatcaaataaatgtgttgcacagacataaaatgtgttgcataagcatcataaaatggcaaggaatactgtcacatcattttagcaatgatggttaatgtttttgtcacataatattgagtgatgatatccttcctgttgaatgactaagtggatgagaataccatatttcctttttattcttagaaatacattgctcagccgggcgcagtagctcacgcctgtaatcccagcactttgggaggccgaggtgggccgatcgcctgaggttgggagttcgagaccagcctgaccaacatggagaaagcccatccctactaaaaatacaaaattagctaggcgtggtggcgcatgcctgtaatcccagctactcgggaggctgaggcaggagaatcaattgaaccagggaggcagaggttgcagtgagccaagattgcaccatcacactccagcctgggcaataagagcgaaactccacctcaaaaaagaaagaaagaaagaaagaaatacattgctcacttgtcaattcttgagcttgagaaaattcatctaggatatcatgtgaaggctcatagcctaaggttttacttacgtgatcaatttcattcttcttctggtttatctaattggtaaaatgcctccttctgtcagttgttcctatttgccaatatgtggaagatgatttttgactatattcagtgagtctccagacttctttttatcatgctttttaaagagatgggacctcactctgttgcccagacttgagcgcagtggctattcactggtgtgagtatggtgcattacagctgcaaactcctgggctcaagtgatcctcatgcctcaacatcccaagtagctgggactatgcagactttttttaaaccatcttgaaagatgatgcagtactttgggaacacagcaataaaaatgtgataatttccctattgcatcacctttctaggcaattatatcattctttcatgctcatattattttgtcttctttagcacagtttttaaatagttgatggctaatgatgaaataattcttcggatgataaatattttgtaacataggaacacaatataggaaaaagatcgaggttcataccatatctcagactcatggttaagtacaagctagaatgagttttagtcgattaaatttctttttctctatgaatggataaagtgagaatatcagcccacaagtagttagaagtgctcagaactcaaaggtaaaattgtgtccaagacctgatggtattctaaaggttaacagcctatcctacttaccaagaatttacatttattatgaggcctgtacaacctgatgcaggaaaatacttggcataattttctataagttaggtagttaggtgctcaacaagtatttgagttgaatcacattggcattcacatcaaacacatacacctacgtcatcatgttaacttaaggttaatagtgtcaccaaaactaactggtctttaaaaaagaaaaactaggccaggcatggtggctcatgcctgtaatcccagcactttgggaggccgaggctggcagatctcttgatgtcaggagttcaagaccagcctggccaacatggaaaaaccccctctctactaaaaatacaaaatagccaggcatggtggcatgtgcctgtaatcccagctactggggagactgccagagaatcgcttgaacccaggaggtggaggttgcagtgagctgagatcgcaccactgcacttcagcctgggcaacagagcaagactctgtctcaaaaaaaaaagaaaagaaaagaaaagaaaaactaaggaatatcattctagacatgcagtaattaagtaaaattgcatcaggagtctaataacatagcatgatgggtcccatgtttcattatttccatgggcagaagagggatggctacattataaataaaggaaaattgtaagaataagaaaagatgaagtatgaaatatttccaactcaaaaacaaactgtatctgagcatgcagaggtacaaaatgtcacctttttcctccagtgtaatgaagggcactaaacctcttgagcatttgatatgttccagatactatattaaagtgatttttttttttaggagacaggttcttgctgtcacacatgctggagtgcagtattgcaaccatagatcagtgtaaccttgaactcctgggctcaagtgatcctcctgcctcagcctcccaaatggctaagactacaaacacattgccaccatgcctgcctaatttattttgatttatttattttttttgtagagacaggggtctcactatgttgcccagactgttttcaaactcctggcctcaagtgatcctcctgcctgggcctcccaaagtgttgagattacaggcatgagccaccacgccagaccaaggggtgaaatcttgataacaataatcaatgcagtcatcataaaacgcttgcacaggctcaatttgtaggtggcacagtgctacatctagtcaaaagcaaatttaattatggtcattgtgctctgagaacttttctcagaaaataataaccagatggtattatagatggtgcatttcacaaatacatgatttgtagttagtgaaaacttgtcattcaatcatgtaataaattatgcacatgccgtcttccacttagctagtgatgttgaaacattcatagccttacctgatgagctcaggctgtcatgagaatttatgtctattcagtactttgtctttaaaattaggtgagagagaaagagaggctgtatttgactatatatctttttatttgtatctctggagttacaagtttttgaatatataatctttcagctgcctttctgcattgcattttgagaaatgatattaaatgctcaaggaaaaaaaacctaacaactttagagggccgcaaagtgaatcatacaaaagataaattaaagctttaaatctttgccagtggatgagtcaagtaagagtggatttaatgaaatggctcatggctttgagaagcagctgtcataatgctgggttggcagcttccaggactgtgtgaggctttctgactgtctatactgaaataggagaactcatttgaaaatgacgaataggagaatagcagaaacttgcattttcttttgagggaactggctgccagttttgaggtccttatttagaaatgctcgattcctgtattgaataaacttggactacatgtatgtcaaaaagaaaagcaaaacacttttatagccttaagcagattacagatgtgtggccaaaccagtggggtctgtttttgtttccaagcaggtgatggctggaagaggagatgcctctgtagtgcagggcttgagttgctgctgtctgagctacatctggcaatgagactgtgctgcttactgagacctaatggcacaggttgccccagtaacaggatattgctgaatgagaaatactgtaggattcatttgtaagagttatttggagggttggattattcagtgctaaggatcctaagctactgatgcatggactcttttcttccctccagtatcttttaattaaactgtacaaattccctggcttaaaaatagtaggaaaagaggaagaaaatacagattcttatgattttaactggtctctggcaatagtacaccgaaacattaatttcttgttgaaaccatctggatatttgtatcttcagtgtaaaacccctaatttagataggactctccattgtgacatggaaaaataaccctttaattagttaattaattttactgtggcctcaaaatctacatattagcatatcaagccaaaaactgttggctttacttgggagccatgtggcttaaactagtaccagtaacttaccacaaggaactcagcaaaattataagtccatgtttgttttggaaggaaggcaattattacgaaaataatttagagatgttcaaactatttcctttgagtagaggtagagagtgaacaaaatctgtcccaagtgggagctaactagcttccttttttgccctccctgtttacaaagtaacacttttagtttactaggtaacatttgcagtatccccagtgtttcaatgtaaaattgtaggtggtagactaatgccacttagccaaagccatgatcacctgaatttttaatatatatttttgtatggagtgagatactgggagaacagtcttcattagcttaaactctagaatgtactgtttgtttgtttgtttgtttgtttgttttgagatagagtctcgctctgtcacccaggctgcagtgcaatggtgcaatctcagctcactgcaacctcccctcccaagttcaagtggtactcctgcctcagtctcccgaggattacaggtgcctgcttccacactcagctttttttttttttttttaatggagacggagtctcactctgttgcccaggctggagtgcagtggtgtgatttgggctcactgcaacctctgcctcccaggttcaagcgattctcctgccttagcctcccgagtcgctgggattacaggtgccaaccaccatgcctggctaatttttgtatttttagtagagacgaggtttcaccatgttggtcaggctggtctcgaattcctgacctcaagtgatccactggcctcggcctcccaaagtgctgggattacaggcataagctaccatgcccagccaagaatgtacaatatttttaaagaaatgcggtttattaccataaaatacaggttgagcatccctaatccaaaatctgaaatgccctaaaatccaaaatgttttgagcactgacatgacagcaaacgtagaaaattatgtgactttatgtgttcaatgtatacaaacttcctttctgaaacaaaaattatttaaaatgttgtataaaattgccttcaggctgtgtgtataaggtatttttgaaacataaatgaattttatgtttatacttgggtcccatctccaacatatcttatatgtatggaaatatcccaaaatttgaaaaaaatctgaaatctgaaacacttctggtcccaggcagtttggataaggattactcaatctgtaaatacagtagctcaaattgattttgtaaggcagtcaagttattatttatagtattttaatttgtattattcttttaatatagcaattcattttatatatttatataaataaattttttgcaattgagcaaattaaaaaaattaagtgcttccttcagatctacattttattttctatttgttatcaatttaataagtaaaggacacacagatcatctgattgtgttgtcagacatttgaaggtgcaactgatgaatgttcactgttgtactttgttttgtcatgtaaattgttttaaagagaagtgaatgttgagcatatagtaggccacacgtgcctgtggattggctcattgttttaggaatgtgtaattctggaaaagatttgccaagggtattcaaaagtatagtttgatattagaaattatttgaaaataatctttatagcatagcaccattttatttagatcaatagtaattcaagcagtatacataatttgctattgtaagcgtagcatataacctaagttttcttttacatttgagaccactgtttgctgttggtcgaatttggtcttccaagattttttgcttagtgacctaattgccagcctttgtgaagagctgttacttattgtcaaaccaggcagtaagggtttgcttttatctttttatcagttctttcaatgctagtagtcatgagattaatgtagttggatactaaaatgttaatacgtgttagataacaaactgggaaagagatgaatgacatcatgaaggaaagggcagtattgcacttacagtgatttcatgatgatagaactaacctgcctaaaaagacattgggtggaaacagaaaccaggtgtaatagacgcatccaagtagtcaaggaaagaaaagacttgtaagtaaataagataatctttgcttcaaaaatatcttcaaaggtttaaaatgtgctttaccctcatatataatctttttgagcctatttctttacctcaaacatggggaaaattgcaataatctgtatcacggtatttgcttccaaaacgactaattggtgtaaatgcatatcaagccggtaaagtttacagtggacttgtttaaaatgcgtagattggaattgttgggggagcaggccagcagcatgggatgttttttttgtttgtttgtttgtttaagactctgtcgcccagactggagtgcagtggcacaatctcggctcactgcaacctccgtctcctgagttcaagcaattctcctacctcagcctcccaagtagctgggattacgggtgcctgccaccacgcccagctagtttttacatttttagtagagacagggtatcaccacgttggccagactggtctcgaactcctgacctcaggtgatccgcctgcctcgggctcccaaagtgctgggattacaggcgtgagacaccgcgccagctggggtgatttttttcttagtcaaatcacttctctacccatcatctcacactgtcgaatacaaagactctccttggggctcaatgactcatctcccacctctggtttgataatcatggctattataacatgttccctttttaattagttattttaaaattattgtaggtcttgtaatcataatcaataataatacgtaatggctccttaagcacttctatcctagataaggttgagaacattattaaaattagttttggtagtaatcaagtaatgataattcttatttatgaatttaaatatgtaggagtttttttattttagggaagcaaaaaggactagaaagtatgatgtctcatgattagaaaactgctataaaaatgaaggtagaattgatttgggctgttttggacattttaaatagaaatttaaataggtattcaaatagcaaagtcattctactttaaaacttctatacttttttaggatcttcaattttatatttaaattatatttttgaaatggttttagaagaaatattgtatcttaaactctaactactaataagtaagagaagatatatcaaaggtttgatcttttatctcctagaatatactattcattcgtttcccattgtacgtcatttgaatgttaatggttagcctcaaatggttttcaacataattgtatagctactattattggaaaattggagccaaggactcatacacatatcagaagtggtaatgaagcactttggttttatgaaaatatgtttacaaggtagtcacaggatagcaatattgcatttactgtaatacaatgatggtggaactaagtgcagtggaacaggatgctgagaccacagttaccgcatctctaagtgcctcgtctagttatggtccaacctcagatataactcattggtgttgaaacacacctagcaacattttaagcatagaccgttcattaaaaggtacctttttaaaaatttttatttttaaaaattgacatgtaataattgtacacatttacagggtacacagtgatcagatcagactgatcagcatattcatctcaggcatgtatcatttctttgtgttgggaaaattcaatatcctgcttctagctgtttgagattatgtcatatattactgttaactgtagtcatcctacagtgctgtagagcactagaacttattcctcttatctagctgtaatttggtatcctttaacaaatctttctctatcctcagtttctacctacccttcccagcctccatcatcctctgttctactctttacgtctatgaaatcaacattttctagcttctgcatatgagagcatgtggtgtttaactttctgtttttggcttatttcacttaacatatgtcctccagttccatccatgttgcttcaaatgacaggattttattcttttgtatggcttaatagtatttcattatacgtgcatgcacgcacggacacacacacatacacacacacacacacatcacattttcttcatccattagtctctttggacatctaggttattccatatcttggctattgtgagtagtgctgcagtaaatatgggagtgcagatacctcttttaatatactgatttctcttcctttagataaatgcccagtagtgggattgctggatcgtatggtagctctatttttagttttttgaggaatctccatactatcctcaaatggttgtactagaacagagcttttttaccttccttccatttgggaatcttcttacccaacatgtatattagtaacttggctatgtatgttccattctctgtctcaaatactgtgtctaggacatctgcaatctttggctatgaccacgactgtaaagtgcatgacgcttttgctctgtcatcagtattagttgacaggcaagtaagatagtacttctcttcataacccctttacctgcccagcagaataccagtacagacagacccagaatatctctgggctcaagaatccagacatttataggatgggacttttatctataaatcaccttaagattagtaagttcttagaattggttacctttgccatttctcagaagccctttgtctagtaacctgtgtgtcactgtcatttccagcctgtctttcctacacattgtttatgcaggctttaggagtgcccaccccccagttctaccccccacccccaccctagcctttgtggttttaattatcctgtcttggctgattttgttttgttttgacatttcatccattaaattcctgacactggctatctctttacaattattatactatttttctttctggctcgctcttcctgattgctgtaatccatgcccttgactttaaataccatttgtaagtagactaggccaaggtttatttctctaggccagactctacctagttatttcataggcatatgaatcctaacatgtccaaatgagagttcttaattcccctgctacccagtcctcaatgtggttctctcaaagctattctatctcagtaatggtcctatgccctctcctagggattattgctgagaacctagaactcatcatcgtctcttctgcacatcctatgaattctggatttatccacttatctccatcttttccagcactaatctaaactcccattgtttcttgctggagttatttccgtatcctgctaatctctgctctcgttctctctccctgacacatgcgctgctttcttctcccacaccaagccattctctgtacagcagccaggatgtagagtgtttatttacataaagcagatcctggaacccccaaatttaagttgtgttcgtggcttaccaatacgcttaaaaaccaagtgcacagagagaaaacaatgaagccttatttggatatgctgaggataattgataacgggtaacaactaacaaacacgtagttggtgtcaggtttgacctcctacattccttacaggtattagtgtatttgacccagctcctccctacctccgcagtatcaccccatgcctctctttcccccgactctcccctgctcagtgtcacacaagtcaatatccccagcttgctaacccccgggctgacagatctcattgtctataatggatgttccaaggtcccaccttcagcctcagttttgttgccatctttccagaatgaattcccttgatcattctgttttttggagacaaggtcctgctctgtcacctaggctggagtgcagtggcatgatcatggctcactgtagccttgacctccctggctctggagatcctcctgagtagctgggactacaggctgcacctggctaatttttttttaatttttagtggagacaagatctcactttgttgcccaggcttgtctcaaactcctgaactcaagcagtcctcccacctccgtctcccagagtgctagaattacaggcatgagccaccatgcctggccctgatcattcttttctgaagaaaacaccccttcttcattattctcaatcctagcagcctatttacttccattctgaaatgaatcacattttagtattttattggttcgttgtcgttctctccccccatagaatgtaatctctctgagtacagggagcttatctttttcccttttggagcctcggatccagcagaatgccagacacttagcagccactagcatttgatgagtgaatggcttttcatacacaattttagacattgttcctgattggtctctctagtcaataatagatttatcaaatctaatcgataatagatttctttttcttttctttttttctttttctttttctttttttttttgagaagtcttgctctgtcgcccaggctggagtgcagtggcatgatcttggctcactgcaggctctgcctcccaggttcacgccattctcctgcctcagcctcccaagtaactgggactataggcgcccgccaccatgcccagctattttttgtgttttagtagagatggggtttcactgtgttagccaggatggtctcgatctcctgtcctcaagatccgcccgcctcagcctcccagagtgctgggattacaggcctgagccaccgtgcctggccgatagtagatttcttttattgattagagagactaatcagcaacaatgttttaaaattctcacatagatctctgaatgggaaagcagtcttgaattatgcttgcagggagagagaggggaaggaaggaggaggaatggtataattagacttcataaggctagattttgtttctacttaaataatggtatcacagtgggacatattatccatgcagaaagtgagtgggcatctggtctattatctgtggtctttcaggaatggcagctctttagtttaaaaaacaacaaagtgcagcactgtttatttaatggaaatagaaaagcagtgcctgtgtattagtggctcagatttttttgttctttgttttcagctgtctgctgtatgcctctccagcggggtcttacagaatctcaagtctaccatgatcaaagctgaacccattagctccatttcttaattcctcctgtatcctctgttaccattagtaactattctccaactcaaagcatcagattcctcctcttactcactcccttcatccccagtcaccagttctgtgctgttattttatccaagttctcagtaggcttcacgagcaccgccttcacatcccaactgtcgctcctccacctatctgtcctccatgcttctgctagctcatgtttgttgcaatacaactaaccttgccactcttctgcttcaggcttttctactaggctctgcatctagatgatggtccagactcctcagcctgtgaaacaaagcccttcataaaagagcagagctacagctagtcagctcccttcctgcagtccaccccctcctccaccatactgagaattggcaattcctgtagcactctttgtatgagtccattttcacactgctataaagatataaccaagactgggtagtttataaaggaaagaggtttaattgactcacagttctgcatggctgaggaggcctcaggaaacttacaatcatggcagaaggggaagcaaacacatccttcttcataaggcggcaggaaagagaagagcgaggagcagagtgggaacagccccttataaaactgtcagatctcctgagaactccctcactgtcacgagaacagcatggggaaaccactcccatgatccaattccgtcccaccaggtctttctctagacacatggggattatgaggattacaattcaagatgagatttgagtgaggacacagccaaaccatatcactcttcatctgctacgggtgccattccctgtttctacagtgtcctgtttgctaccttctttgtagatttctattcattcatcatgtcccagtttacctgttacctcttcaacagattattcttcagtctgtccctcccaaactccaccaatgaacattctttgttcagcccattattgttaatatgcacttcactgaaaacactgttttatgcttgtttacatcccatctctgcagggctctgagcctatagtcagcagttgggaacttactaggcatagcgcccagtaaaggatagctctttatatatatatatatattttttttttttctaaaataataagccccaagaaaaacattacctgtgaaaaacaaatgatatttttataccattttcaaaacctaatagcaataaaaagaaaagaaatgtcataagtatacatttaagctgtagttaaaaacagtaaataggcacagtatttaactcttatcatgtgctgttccaagtgtgttatttacatcattggctgttcacaccatcccctgaggtggttaatatttccatcccatgttaaagatgaggaaaccaagtcacagcagcctaagtgacatgttcatagtcacattggagctggcaggtggcagcactgagaatgaaacccacgtggctgagctctggaaagtcaccattaatcaccacactagaccttctctctaggatctacataactagaacatacaattaactggagtatatgtaagtgtagtcgttccttgagaaaggaaaagaattcacaaatttcatagcctcatcccttgtgcatttgtggcattgtgctaggggtgtctatttgatatttgaccctacagatttctcagatgccaaccaaccacagatactttaaaaaaagatacttaatacttaccaatgcaagaaagtgggcttgttggaagaggaaaaatgttagctcactaatggaaaatcaactaaaagtcttacctctccagaacatgcttttcctaaatgttgtggctaacccaagaagctacatcatctttacctttatgatacaatttaaagtacttttctacttacttcaagccctcagagcacagaggcaagggaggccttgggctataaaccctgtagcctgagccacatggcttcttctcctggacagatacctggcatattctgccactgaggatcagtggtgcagatgtatctgttttctcctaggaatggggctccacttacgaatctggggcaggacaaggtattgctgcattttggggagcgtgctggaaggaggagcagagtttgttgtttttgcttcctgatatggactggctgtgtctccattcaaatatcaacttcaattatatctcccagaattcccacatgttgtggagggacccaggggaggtaattgattcatgggggctgatcttctctgtactattcttgcgataatgaataagtctcacaagatctcatgggtttatcaggggtttctgcttttgcttcttcctcatttttctcttgccttttcctcatttttctcttgccgccaccatgtaagaaatgcctttcacctcccgccatgattctgaggcctccccagccatgtggaactgtaagtcccattaaacctctttttctccccaatcttgggtatgtctttatcagcagcatgaaaacagactgatacacttccttaacagaaccaattattttttcccaaaaaagagggggagaagcccagaagcatgcagcttctctcttctttctaaggaataggtcttcacaaagtgcccccaaaagaaaaggaccaggcttttctcttactttgtgactttcctaggttgctttgtagccattttggacacagaccacctatagctgtgtagtagttctcatgtgtatggacacagtggaaggagatgccaggcacatagttcttgctgcattgacaccttttcagggcatcttcttttaccatcttctgtagaaactgcaacagcccggccaactaccagccccagcccacccctagctttgctgctttcattttctctgtaacacttgtcaccttgtaatgtgctagtgtaacatcgttgttttagttttcttatatctttccttccctgtagaatgtaaataccaggaaggcagggaattttgtctgctttattctctgcagcatccctagactccagagcagaccctggaactcaaatatttgttagacagccaaaggtcatatacttccaactctccacccaaaatatatatggatcacccatccttagtagcagctaaacctttggacatgaggaatttgctcgttcacagttttctggcctagcatctgattaaccaaactttttcacatatcaagaatttaaaatgactccaaaactttttatgaccttaggtgcttctccttaattctagttggttcataaagctgtcagaacaataatctgcttttgataatatatgacttttcttgcctccaagatagcctttaaaaaagcaatttagccttttactgtaattatattccaaatttaagtcttgccagaatatcattttccccctttaaacatactttttatgatgccaagatattttaaagaaaagttcagataggaagcatatttaagatgtcagtatatgtctctaaaatctaagaacatttttctacagagtccagatgataccatctcacccacaaaattaacataaatttttagtaccattggataccatgtccatattcagattctccctgagttccagaaaggtccttcacaggttatgcatttcacatcctatccggcaccagggccagcatcttacatccttaattcttaggattcagaatagcactttttatatcctgacactgacttgctgaagaagctgtaccagttttcctataaactgtccactccttggatttgtcttatatcatgtcccaggggtattgtttagattgttgctctattgctaggatattcatgttaccctaagtgtgtactgagatagcagagtaaagagagattgtcttttaaaggttctgcccaggaactgctggtttacacaaaagctgggctttagtgcttctcggatctctttgcttgtttcagtaatttttttttagaaattcactaattcactaacgtaagtggggcagggtttacaggagcatgtgttgagagaagttggtttgactttaaatggtcatttttacaatccgtatttaggccttacaggtcgcatacaatctctgtcacatattgctgtcatttttaccccctttcttttctttttataatcctttaaaaaatgcaaagcccacccttagctcacaggatgtacaagaacaagttgcgggttgcagtttgccaagacctgctctgtgccactgctgacttgccattcttggagcccactttctgttcttgtcagccaattccctttcaggtgctcaggtttccctccctcctgtcaccgggcctttgcacatgctctacccaccctgcctagtggagagctatctttggcccctggacttcattcacttcggaccttctttgggtcacatttcagtcatgcctcactagacacctggaatctctgcctcactagacacactagcactcactcttttgggtcttctggctgtatgtaattgttatcagggcagtaattttgcatttatacaggtgctgaggtcagtgtctggcctttggctacttgccttgtgagccacctttgctttccagtgtacccctagctcctggcccagtgtccagcttcccagcatccattcatgttttccctggagaccattctgtgcccagcagccagagacatcattgcaacttaaatctcattgagtcgttccagttgctgtaagaaatgtaaccgtactgggtaacactatgcctgtctgtctccaccaccagatcttatacttcctccctcatctgctactccctaagctcactggccctttgttgtttttgctgaacgtgctaatctcttcctcacacctgggcctttgcacttgctcttacccctgcctcagccatccatgcactctcttggttttgccgtgcccgacttcagcatttttagttcacatggctcttccgtggggcccttccctgaccaccctgtttgaaatgctacccatccctggcacacatctatcatagtcattcattagcaattagccccatctcctttccctatagtacttttccataattttttttcttgctcatattacacctccccaactaatagatagattccaagaaattgagtgctttatcttcactacctggaatagtactggcacttggtaaagcacagcgaatattgttgattgaattactaggggttggcttagagaggtacttaatggaatgattcaatggatgaatgaatgaatgcattgccacttttttgctcattatcatcaatttgtacatatgcctttcaactcaaatatttatccattggctaaagaaaaaaaatacctgaatccccgtgtctctgcagtttacccttcctcactgttaaaactcagtgcctgtgtaaaatttcattatattttatttacttcttattccacttgtgcattatgtggatattcctgcctcatccccacagccacctatcacttccggccaactcagatgcctctggctcgcaacaatcacttctctgttgaatttctgaagcgtttaatctgcagtatgtctgttactcatacagcagttagtgtgaattgtctcactcagaataagtattcattaaatgtgtaagaatgatgatatagcctaatttcagatcaagattgtgatttatagctcattcttaatcagctgtgtcatgactttatttatttattccttttttttttttttttgagacagagtctcactctgtcacccaggctggagtgcaatgcagcttctgcctcctgagttcaagtgattctcatgcctcagcctcccaagtagctgggattacaggcgtgcacccccacgtccagctaattttttgtatttttagtagagacggaatttcactatgttggccaggctggtctcgaactcctggccccaagtgatctgcctgcctcggccccgcaacgtgctgggattacaggcatgagccacctcctcaggcctgagtcatgaatttttggtagtccagtcatgtggttatcttcctaaagctggaggccttaaacctagggccccaggtgggcttatgcctttagctgcaagtaacaagaaacccttttcaacctttttactgatttatttagagagaagtacacataagaggtaatgcaagtaagcaaagttttttaagaccacacaactagatagccagcatccggaccagaacacagagacttgctggcccctagaatcctctctcctggcccctgccagttactggcctttcccctgagttctatttgcctgcagtttgcttgttttcatatttaattcaaatagaattaggtgatgtgtccccttgtgtttcgcttctaacagtgcctttatgcgggagaagtactggctatttcttactttgccctccctccccggaaacattttcctaatttagtagcagtaatttcaaaaactgctttcctttcggacaaactgacttatccagccattgtaccttccagtttagactctggcagtttggagagttgagacagagagaaggagaaccgtctgtttatcttcttgaaaaaaactactgtattttctctctcttctgactctgggagcctctagactcttttttcccattttcatatccacagaggaagagtctgaacctcttcctgctgagctttcccctggttggttgcatttcaggaactgacattggttgtcttccctcttccctcatcagtgcaagtaggttggatctcatgatagtccatattcacataaccatgagaatcagagctttctctctgtcatttcctccctgtttatctgtagcaagaagaaaaaagtccgtcttaacagagactgtgaaagaataaatatagactttattgttttagagcagttttaggttcacagcaaaattaggcagaaggtactgagattctcccatatactccctgttcatacacttgcacagcctctcccattatcagcgtcccccttagagcgatttgttacaatcagtgaacctacactgacaccattattatcacccaaagtccatagtttacattagcattctctcagcattgtttattctgtgagtttggaaaactgtctaatgacatgtacccaccattgtagtgtcatactgagtacttttactatcccccaaatcctctgtgttcctcctgttcgaccctctcttgcctttaacctttccaagccactgatctgttactgtctataattttgccatttctagaatgtcatatggctttcttagaaaatacaaatggtgacttttttggcatgactttaataaacagaaatgaaaattggtgtgtgaatcaaaatctttcactctgtaaagggacttatcaggcggcacctgcatgtggaattatatcaaggtcagctttagttagaaacagaaggagagtcacctttgtgatgtcatttctccttcatccaagtaaaatctcgcatgctgacacataaaattttatcatcagtgatttatttcctcgtaggaatgtccctttgaccttattaaattcagatactctggggatggtcagcattttcagatggttcccttgttctgtaaaaatgtttgttattggtgtttaaaagctgtaaaagccacccactataaattgatagccactaaagtctgcgaatgtggtatgaatgttccactatgttgccaagcgtttattttattgtgagttgttatttgattgtttgtaaggaaattgttttatgatgctcagctttatatttccataaactgttcctcccttgcaactccttaaactgtgatgagcttttcaaaacaagtccacaggacaacagtctgtccagcatttgaagaagtggtggaaaagtcatttttttcctttcagtgtttctagctgttcatgaaaactgcagttaaaagttgtaatgttgttgtgtttggcattctttgggaagatgcagcattattcaaacaaaaccgtgtgctcttgttttaaatagtgtccaaatgaataattgaattcatggacatctaaatttaattccagaaatcaaagctatggtaataagaacttggacctgagttctcttaggccaagtaatttaattccttagccggttgaactatttattacgtgtctccgttcctggttattatgccagtaaattgctcaggcagatgcagggatggatgatgggcatataattcactctttttcacggctagacacataccagaatgcagatcacactaaacagctgtttttacaaacatggtttctattcagagctttaagggccacatccaagtaataacaaagaagcctggagaaggaacctggggatacccagggtcatgttttcaccatcccacctggaaacacggtgctgtccaaaccctggatggtacacttggacatcgtcattccagtcatggttcaagatcacgtgtatacatcatgatttaaagagaatactggtttgatttttcttcctgactttccctgaattttccacttaaattggaaaacagcgctagttagtgcccatgatttgattgaataagtaagagatctcaaacacggtaaattaactgatgacatgcatcaggtcatctttctttgattcaccagtaatacaacagtgagatcctacagaaaaatgcaaaggcagaagctcagggcagctgagcaactgttaaggattcttttgaaatgtagccccacgtagtaaactttcgtgcaataatttgggcagtcaaaaaaaaaagtcagttatttcacctcatttatttctacgaggagataaaggcttccaacatctgattttcagtgccagtgttttctgtttctcttttcacctatttcgtcctagtcttgtggaaatgttacaataactgattaggattttctctgtattaacacttcatttattaacatatgagtaagttgctattaataaattattctgcttaatcagtttctttttattctttagccacatgctaaacttcttcggatgtcttcacttaatatccttacatcatatttaatcagagttagaaaggcgttccacttgggggtcatacacatttttttgaaacttttataaacgccctttatactattcttgtatcctacgtaatcagagtcaggtgttccatggggatcatacacatctttatacaacttgtgtaacacatgctttaaatcctgaggtaatcagagaattcctgccattgatggattaatctctttacatatctttccctttcactctcagcaaaactacttatggcggtcctgttagactttgaaagcctttcaggtttatggaggagtcttcctttctattgtcgtagatcatggaatcatagtgttcgcttgtctcacgtgtttggaatctgatttcctacataatgctgtgctctcactacgagtccaaggcttcctgtggctacaaatcccgggttcctatcacttttcccaatgatgagcttctccttgttggccagaatcagctctgtggtaataattcccttctgctttctccctctcgcttttttttttccttctgggtacattataatgtcagcatagcagcttttaattctattactatggtacttctcgaatagacctgtggtagttgccccagaaaggttgaaaccccctgccacatctaggtctttctcctgtattggttttgtgatctgatcaaggacatctattcctctagtcctgctaggtggtatacgataggcttttactattagatattcaaatgctgtcaaccatgcctgccttgacaggtacatgatttccacaaggatttcctaataggcctttttaattttgttctagacatgcccttcttttgccatccaaatttgcttattttttacaaactatgatgcatcagcatgtaaatgtttaataccataaatatttctgatcctcttcccaatttcactgagttactggttatctcttgccattattctcagcatattgcagtggatctcagaatattttcccctgaccaccagcatcagtattacctgggaatttgaaatgcacattctcaggccccaccaaggcctcatgattcagaaactctggagctgcattagaaactgccacaggcacctggtgatctgtgttggtttttgtttgtttttaaggagacagtgtctttgtctccctggctggaatgcagtgatgcagtcatagctcacagcagcctcgaactcctgggctcaagcaatcctcccgccccagccttctgagtagctggaactacaggtgcacaccaccatgcctggctggtttttgtttgtttttaaggaggcagtgtctttgtctccctagctggaatgcagtgatgcagtcatagctcacagcagcctcgaactcctgggctcaagcaatcctcccgccccagccttctgagtagctggaactacaggtgcacaccaccatgcctggcttttttttttttttttttttaatttttttggagacagggtctcaccgtgtggcccaggctggtctcaaactcctggcctctaggttttttcccacctcagccttccacagtgctgggattacaggcatgagccaccacatttagcaggtaggtgatctgtgtttcaataagccttccaggtgattctgatgctcactgaaatttgagaaccactgaaatatttggttttctacaaaacataagcagttagtaaccatagggtacgcaactaaatagttccagcaggcatccctgaccacagggcattgcagatttacttaagtcagtttcatcttccacctgtgtgagttccagcaggcatccctgaccacagggcattgcaggtttacttaagtcagtttcatcttccacctgtgtgagttccagcaggcatccctgaccacagggcattgcaggtttacttaagtcagtttcatcttccacctgtgtgagttccagcaggcatccctgaccacagggcattgcaggtttacttaagtcagcttcatcttccacctgtgtgtccagtttaagctctcagttgcagtttttaaaccaatttccaccagcatatactgagtatccgctaccgtgcaatgcgttgcggctcttgtatgtgcactatgagaagtaattcccataatacggcaaactcagttttgatatccaccaccccactttttataatggactacatttttcagagcagttttaggtttacaaagaattcaagcagaaactacaaaaagttccctctacctctcacttccccactccccaacagtttcccctggattaacattttgccttagtatggtacgtttgaaccaatatcgatacactattattaaccagtattcctgttttaacatgagaggcgactttttgtgtagtatagtctcttggttttgacaaatgcttaatgctgtgtatctattattacttatgacagtatcgtgcagagtagtttctaaaaatcctctctactccacctattcatcccttccccactccccctgaaccactggcaaccgctgatctttttattgtctccgtaattttcccttttccagaatgtcctgtggttagactcatggcatccccttttagcaactgcagaaactaagaactgtccccaaggataaaaatttttgcagacccactgagctgggatttatacttagacctgctgaattgaagttttgggtgtgtttcttctcaaattgccaaaattccatatggacgacttttcttttccttccctgaaatgtgtttaattgactttttctgttatttgtgtttgccttcacagtgaagacaaagtagtagaagtagcagaggaggaagaagtggctgaggtggaagaagaagaagccgatgatgacgaggacgatgaggatggtgatgaggtagaggaagaggctgaggaaccctacgaagaagccacagagagaaccaccagcattgccaccaccaccaccaccaccacagagtctgtggaagaggtggttcgaggtaatccaccatttgcttggattccccccacccccaaggaaaagaaagcgtaataccagagttggaaatatccaccctagcaccactgccttccccaatcaaaaacatgtttttttttccaaaaggcttcttatgcttgtgaaatttttttggtttaacaagcaaacaatttcaaataatgtgaaatctttattatacagtttgttttgtaccttgtatatgctgcttggcaaatcccaagttaattctacaagactccgcccaaccaggtagtcatctaatttgacaaacactgagttaggtgactccttggtattcctttggcagtgagtgtttgttatataatattgtctgttaccacctagacgatgagctccttgagggtaaggacttgattttattcagtattgcacagagtgcctggcttgtagtttcgataaatcttagttgagtgagtagttgtgattagatttcattaaagaaggagatttgggccaggcacagtgcctcacacctgtaatcccagcactttgggaggccgaggcaggcggatcacctgaggccaggagttcaagaccagtctggccaacatggtgaaaacccatctctactaaaaatacaaaaatgagccaggcgtggtggcacgcacctgtaatcccagctatttgggaggctgagacaggagaattgcttgaacccaggaggcggaggttgcagtgagctgagatcacaccattgcactccagcctgggtgacagagcaagattgtctcaaaaaaaaaaaaaaaaaaaaagatttggtgagtatcgcattattttatgctatgaattttaacagaggtgatttatgttgagtttacattgttttattgggaagtacggcagtgctttcttcaagaagtaaatatagtattaatgtcttagactttctctattgaattaatgtttgtgttgcaaatattgtgaactaaaagaactaaaggtcatacttgtctccatgaaataaaaacaaacattcagttgatattaaatgaccaaatgttacagaaacgagtaaactgttggattgagttccttaaagagtatgcatttgttccttaaagagttctgcatttcatatctgccatctgcttggcagatagtaaaagatgcttctagagctagattgaatgaatatgtacttactgaattttaatgtactgcaaatacttataaaggtcaaccacaaatgttacagcatttacaaaaagtggctttctctcactttttgctaaagtttaatgatttcagatttattgttctattagagcttaacatgggctattttgtctccctcaactatattcatagttgtcactatagtattttcttccctttgttgcattttttaccttattaaggtgtaatttacatataagtttcatttgcttttaagtatataattcagcggctttaagaaatttgccaagctgtgcaactatcaccataatctaatcttagaacattttcgtcactccagtaagatcacacatactcactcccagttaagccctctactcacctctagccccaagcaacaactaatctactttctgtctctatagatttgcccttttttggactgttattataagtgggatcatataatacatggtcttttgtgtccgacttctttcacttaacacagtatttttgaggttctacatttctttaacttgagcttttaaaattgagattattctgaattaaacactcagcgttagcttaaaatttattgaaagttttacatgttctttgaaaaaaaagaacagagtgcaagatggattaagtttatcattccctacttaatgacagtttcttactcactttagcacataagtaaatgtgctagtaaatgcgcattttgtttaaaccaccatttttcaaatactgagacatgctttctcagggtgtttttcatacaactgttaggaccaactatggcagatctggtcaaatgaacttgttagcctgatgcctgtagcagggaaggacagcttttcagggcttctcttctcgaaacctaaatgaagtgtgaatacaaattacagcagctagcagcctgcagtgggactgaaagtccttggtgaatctccatcaagctgggctgtttaatagaaccagtttagtgtcccattttacttgaaacattagattttgagcacctgcttggtacaagccattttgctaggccatgtggaatggatgatgagcacacacagaccagctaaccctagtggatgttaaaatctcttaggaaatagaagtcaaagaagtacaaagccatctgtgttgtaagaaatgtgaacacagaacctgcctccgagagtaagagggaacttctggattgatcagagaaggttccatggagagcatgacatttgaactagagccaaaagtgtgggtgggtggtgtgtctaccagtggattttgctgtagagtcatcaggactagcaaaacaaatgtggtgccatggaaaggcatatttaggagacaggattggtccaatttaagctagagcagatgtcttttaggttgggaccaaaatatagagaccttcaatgccaggctggcaaagatgggcattaactgcaggtgattaattaacaaatattaattcagaagctactgtgcgctgcagatttttccaggagacaataaagagattttgttttgatgctagtactgttgaggtaacaggtgaacaaggagtgacatcagttatgcagtacaatgagaggatgccacataaacttaggcccatattctagaacaagacaatttgcttgagataaattggtctcattatcgtctgcattagtccagttctttttgcttgagttttgcaggtagtattatttgatattaagacggaacacagagatgttgtattgttttatttcctgtagaaagacgaaggcagttaaaagaatttcataaacaaaacactccaggctaaaggcaaaaaagaaatgaaccttaaaaaataacaagttaataattttgttggcaagaagagcaacaaaagcaaccttctgaaagcaagatacctggtcattgagagatagcaactgttaatgccccagaaatagaggaatctttaatgcaggtccattcattccacctcaaactcctgaacaaaagctctaattgaggcaagtcttcctgggaaagggggcctaacagaaacatgttatggtcagttgtgcccatgcgagataatttttttgtgcttgtagctaattccagtaaagaagtagatgttttagagggtaacgttaaaggggtcagctgcaaagagtccttttcctcctcctcactgttacaaaaggtgacttgtggttcttccctaattgagagcaatggcaacgccataggtgattactcattttgtaaaactctaattacaagtaggttgcttctgtgttcaacataaaaattagaagtgacttgcaaagatgagatactgcagggaggcttacaatcttgttttcagtgttagtgtttcagtacctggaacaaaatgtgatttacagccatcctttctaagaaaattgtcatcattaccaacatattgctactgataccagtccttaatgtgcttcataaaaaactcaataatttcataacccgttaaaaccggaaagaaatggagggaagaaaaataagacacttttagcgtagtcataatcttctctgccatattgtgttagaatcgatgatacccaaatgagaagatgtctgttctctgtcactgattccagtagaataaaattattgtttaaaagtaagcacatccgctgcactccagcctgggcaacagagtgggaccctgtctcaaaaaaataaaaataaaagtgagcacacgattgcaagatctatctggttttgggggcttattgtcatctttggttgttaaaaaaatacttggatattattggttattggtctagtggaataagccattaccgatttgagtacaacagtggtgtatttagatacttgctcctaattttctgttcttcaagaagggattgtacttcagaaaccagagatatcagggtagttttgattgagccataaattctaaattctgattgaaatgggtattgtaataaatggcataatcttttatttaatctagccaattgtgccctgtccagaggaactggacatttcttccttatgttccatttattcagcaactattcgttgtacccctgctgatggctaggctctttgctactgtggaaggcatcgttggggcagagcagacagcattttacctcctgggagactggcagatttttgaagcctttgttgcagatatagattttcacggtcaccactcttgccctttaatgtaatttaaatttttttttttttttttttgacacgggattttgctatgtttcctaggctggattcaaactcctgagttcaaacctcagcctcccaagtagccgggaaaacaggcctcttgtgctttaaagcagtgattctctgtctttaaaccttgtaactatgctgtgtggtggaaattttacttccccgtttaaagccaagatctctaaggccaagaattttttttttttttttttttgagatacagtctcgctctgtcacccaggctggagtgtagtggtgcgatcttggctcactgcaagctcggcctcccgggttcacaccattctcccgcttcagcctcccgagtagctgggactacaggtgcctgccacgatgcccggctaatttttttgtatttttagtagagtcagggtttcaccatgttagccaggatggtctcgatttcctgacctcatgatctgcccaccttggcggcaccccccgccccccgccccccgccccccacaaagtgctgggaatacaggccaccatgcgtggccgaaaaaaatttttttaattggcctgggctgggcgcaatggctcatgcctataatcccagcaccttgggaggccgaggcaggcggataacgaggtcaggagattaaggccatcctggctaacacggtgaaaccccatctgtactaaagatacaaaaattagccaggtgtggtggcatgcgcctgtaatcctagctacacaggaggctgaggcaggagaatcgcttgaacctaggaggcggaggttgcagtgagctgagattgtgccactgcactccagcctgggcaacagagcgaaacttcgtctcaaaaaaagaataaaataaattgtcctgggtcacataactggttaagtgatgaaatcagaatttggacctagataggccaggatatttctgctacactcatgtcaaaattacactttttattttctttataaatacacacaaattcatttcaacctgtgttcccttgtaaatgcatatacctttgatataggcatatattcatctattattttacactgtgcatttctgaatttttagaatttttacttgaagtgatcaggctggcgctgtggctcacgcctgtaatcccagcactttgggaggctgaggtgagcagatcacctgaggtcaggagttagagaccagcctggccaacatggtgaaaccccgtcttcactaaaaatacaaaaaaattagctaggcatggtggcgcgtgcccataatcccagctactcaggtggccaaggcaggggaattgcttggacctgggatgcggaggttgcagtgagctgagattgcgccactgcactccagcctggcgacaagagcgagactccgtctcaaaaaaaaaaaatagaaaaatgatcgggggtccacaaataagagtaatgatcaagggtcagcaaattggggccaaaaatagcctgttttcctgttttctacacaaaagttttattaggcacagcccatcccatttgtttaaaaattgtctatggatgttttcatgttttggaagtagagttgaggatcgcaaaagagattgtgttgcctgcaaaactgaaaacatttactatctggccttttcagtaaaccatttgctaacccctgattctcactataagacggtgactgtgaagttctttctatttcacatactgccatatcaagttgatttcttttgaggtagggtttgtttttttttggttagagatagactagtatagtgtttgagagaatttttatgaccttgggccagttaagtaacctgttttttatgtgtgtagtgtagatggtaatgttatcttgcatgtttcttgtaagaatgactttaggtaacttatgttaaacgcttaccatcatgcccagtaagtgttcaatttacaaactcaagctgtccagattcaaatctttgccttacaagctactaactgtgtaaatttgtataaatcaaataaccttgaatcctcattgcttctttttgtaaaatagggattaataagacctatccaatatttaactattttgtgaggattaaattaattaatttataggaaacactttgcataattcctggtatacagtaactgctcaattaaccttagttgctctcttagttatggttatatcatcattccgatcctccattgcatttgaaacattagcaaactaatgtttactactaatgaggaatgttaaaggtaaaccaataagttgacttttaattataaaaggcataaatgtaacctatccatatctattggtataataaagctgatatttagagagaacattatgttatgattaaaagaaacatttcttgcttaaattttttttgtgtgaatatacactgtatattgaaatatctgcacttaaattttaaatccagctgaaaattggataagatagtattagatgccactgcatttcaagatagagttttatttcttgcaggtattttaagccttgtgggagttcttctgttaagtgaacagatagagacactgatacagatggctctttcaccgtctcatgtgatgataaaagctaaaaggtttgatccgaatattgcttatattgggctaagtgattgaccttggcagaattaaattatttttcttcttctggtgacaattaatctgggagaagtaccatttgatttattgctatacatttcaccaatatccacaaggcacttgtaggtaccagacatggcattggttgctgggggcacagagataggaacaaagtggcttgctcaggttgcttctagccatatctgcattgtccttgagagggatgagtctctcaggcctgcctaggaaggaattttggcagcatggagaagagaaagtgctcagcccggaacaaaagttttcacctactatgttgcagagaagttggcgtatcagtaattataaaggaagaatagggatttactgggtgatagagcaccaaatagaatgaatgcaatacatacttgaagtaaatcagagtagcttgtattgatctcaaggggagaagaaacaaagcttagcttaattctcatgcctctgttgttacttgtttgtaatggacatgacacttacaaggtatcctataattcactaacgggatttttacttatgattaatatttaactctccacaaagcttggggtaaactgtgaacttaacttgctgtgaacccgaacatgaactcacatacttcagttggaggcctcagtagtagcatgctgtacaaaaatgaaactaaagctccagggagtatttgggaacagggcaaaagggtaatggctcctccttatagagcaagcctcaggcctttacctttgtgttttgaagatggagaggatgcacttctactctcgcccgggttgtagcatgcttgctaatgatgtcaagagaactagtgtcagcactgaccatagatgtgacaggtaacagcctgttattttgtgccccatgtcatggcagccattgattccgaggtgtttgatacacactttgatagaggcagagtgaagcaggacatggacaagcatctttccgtgtagtttaatggtctcaatctagaaagcccactcagataattaggttgcttaaaatgtgatgagactagggaatagagccatatagaagtgtgtgtgagagagaattcagtggtttagtatattcacaaagatacacatttgacaccagcctgggcaacatagtgagaacctggctttaccaattaaaaaaaaatagaatagcagaagtaatcagtgaaaggcattttaatacaattatatctagatttattaaaaataaaattttagtccaatttaattaaaggccagaaactagatttttaaagaatattagtctttctcatattttccccaaatcagttgctttaaaaaaaaaaaagtgtgcagatgcctcaggcacaataactgtactcaactcaagaatttgcaattaagaaaaaaaaaaatcaaacctcaaagaagaaatccagcaactcagaggttcaggttcatttaaacatgcatacatttacatgggcacactttttttgttttgttttgtttttaagatggagtttttgtttgtcgcccaggctggagtgcaatggcgcgatctcggctcactgcaacctctgcctcccgggttcaagtgagtctcctctctcagcctcctgagtagctgggattacaggcgcacacaaccgcgcctggctaactgttgtatttttagtagagacaggttttcaccatgttggccaggctggtcttgaactcctgacctcaggtgatccacctgccttggcctcctaaagtgctagcattacaggtgtgagccactgcaccagctgggtgcacctttttgtttgtttgttttgttttgttttgttttgttttgttttgttttgttgacatggagtctcagtcacccaggctgggattcagtggcacgatcttggctcactgcaacctccgtctcccaggttcaagcaattctcaattctcctgcctcagcttcccaagtagctgggactacaggtgtgtgcaaccacacctggctaatttttgtatttttggtagagatgggtttcaccacgttggccagactggtctcgaacttctgacctcaggtgattcacccaccttggcctcccaaagtgctgggttactggtttgagccaccacacccaaccgggcacacgtttttagccaagccataggtctgattaagtacagtcagattccttgagcaggttacaaagctgtggatttgaatggagatctttagttcccttgcagaacaatgagtttccaaaagcagagtggcttacagcctaaccagctgcttctctcagcctttaaccattttgccctcctgaaaattcatctttggtttccaaccacctcttccaatatgcctgactttttgtgattctgttagtagaagagtaaaaagtcaaggggaggcaagaatgaatgaatctcatataaaaatgatgctcaagagaatcccttaattttcaagacagcagcccaaattgtaaacattgagacttttacagtgttaaaaaaaaaaaagtgtttacaggccaggcatggtatctcacacctgttatcccagcactttgggaagctgaggcaggatgatcgcctgaccccaggagtttgcaagcagcctgggccccatagggagaccaaaaaaaaaaattgttgttttggctgtagtgtcacaggcttatagtcccagctactcaggaggctgaggtgggagggtcgctggagcccaggtgaggtcaagcctgcagtgagccgtgatcacaccaccacactccagccttggtgacagtgagaccctgtccaaaaaaaaaaaagattaaggcagaggaaatgttaaaggttacgctatatttagttgataataatggtaagactgttcaggtgttttaactatgagagtagggttgcctctttcttaaatttatatatgttcttattgggtataatttctagacagaatatgcaagtatcacagaatatggatggcaattttatgttgcttgcacgtgactttaggttcttatgtttcatgataggagcaaagaaaagtcttgcttgccaattcttatgattgcatctgttctggaaatttactagcatttgttacccaggatttctgaagtgctggtgactgctgcccagtagtcttggtgggcaaagttactaaaatgcatcacgaatccttctggtgtttgcttgggctatggcagggtttctggaccttagtactattgatgttttgggccagataattgttgcggatgattgtcctgtgcattgtaggatgtttagctgcatcactagcctctactcgatgccagcagcacccccaagtgatgacaatcaaaaatgtcccctgggaggagtaggggatagactctctctggttgcaaaacactgggctatggtgttgagatctgcagtgatgagcagctttagatatgtgaacagaagcccaggcgtggtggctcacacttgtaaccccagcactttgggaggctgaggtgggcggattacttgagatcaggagtttgaggccaacctggccaacatggtgaaaccccgtctctactaaaaatataaaaattagccgggcatgatgatgggtgcctataatcccagctacttgggaggctgaggcaaagaaatcacttgaacctgggaggttgaggttgcagtgagctgagatcgtgccattgcactccagtctcggcagacagactgagatgccgtctcaaaaataaataaataaaaataaaaaagtgaacagagaaatacccgtgcaatactgtgtctcatcccccaaagacggagtcttgctgtcgcccaggctggagtgcagtgacacgatctcagttcactgcaatctctgcctccatggttcaagcgattcacctgcctctgtctccgagtacctgggattacaggtgtgcctcaccaagaccagctaagttttgtgtgttttttttgttttgttgttttttgcttttttttttttttttttttttgagacgaagtctcactctgtcacccaggctggaaggcagtggcacagtcttggctcactgcaacctctgctgcccaggttcaagcgattctcttgcctcagcctcccaagtagctgggattacaggcacctgccactgcgcccggctaatatattttttttttttgtagttttagtagagacagggtttcaccatgttagccaggctgatcttgaactgctgacctcaagtgatccatccatctcggcctcccaaagtgctgggtttacaggcatgagccaccaagcccggctggtctcattttaatgtaagctctaacttctgtatcactgctttgcacattgtagataaccagtgaacattttttattgtataagaaaaagtaaaataaacaaaaatatgccaaagcaaatatgataaatacacatttagtaaggtaaaagcaagtatttgataaaatgtgtaatgtagtctagtagctttatttagaaacagaaaacaacataaaatgttgacttgaaacattgcgtatgcatatttgccatgtagacagtgagatatggaggtaaactgctttcctagttttgttttgtttttttttttttttgttcaaaaggaattcactctccccttgtccactgttataaaatagcaaatggtgattagcatctgtgctgtaaccagagacactgctgttcccagctggaatctgtaggttctttgcctgctagagattgtgacaagaagccagttaacatggagaggtgtacatgtcagtcttccccagaaaaggacatgaaacagtaggaccatccttccaacccatgacctacatctagaggcattctttttttctttttttttttttaaaccggaacagaaatatcatctaattctttctttacagagaagtggtataaggaagtacattctggccaggcacgatggctcatgctgtaatcccagcactttgggaggccgaggtgggtgcatcacctgaggtcaggagtttgagaccagcctggccaacatggtgaaacccctcgctactaaaaatacaaaaattagccgggcgtggtggcacacacctgtggtcccagctactcgggaggctgaagcaggagaatcgcttgaacccgggagacggaggttgcagtaagccgagttcactccattgtactctagcctgggtgacagagcgagattcgtctcaaaaaaaaaaaaagaaaagaaaagaaaaaggaagtatattctaagcccttgaattgatcttggctttcttcattatttttacaagtaaaaataaaaactttgatatttctgatgttctgggatattataggaatgataccacttgaattcagctttctaagaagtctggtatttcaatagtcttaatatgagtaagaaaattatgatcttggtactggatctaaggcagaggtatcgaagctgttttaatgttgcttgagataggacagaacttcagagtaaaataaatgtgtatagacaatctgttcaatctgttcaaattaagttgttgagctgtatatttgaatcttaagactactaattttgttgtatctgtcttttcccaaatatatgtgtacttcttttaataagccaaaacctatgcaacttttactaattcttccctaactacttcttttggaaaatgattaaatcttatgtctcacgttttgacatatctattgcatttaaaagataaggttgatcatgctgcttctcaaactgagatatccattcgagttatccaaggcccttggaaaacaatcgttgttgagtctgtatggggggcctgagtcccaggtggtgttgactctgctggtccatgatcctattttgagtagtagactctagtagcgtctcctgccttccatatggtgcagatttgcagcattgagacaggaagtaagaaactgaaaaggaaaaccattcttacctttggtgttattgttcttggtatattacagataccaacaagtatgaggcaatcctgagacatctacctactgagcttttctttccttaaattcacacctcaagaccaaggaaaccgaaaaactcttacagtctccctacatgtgttcacttgtgcccctatttcctgtcattaacatggtagtgtagccaactcctgctagcctgtaaaagctaattattacagtatagaggaattttgtaagccatagccattagtagcttgaaataccaatggtgggagtatttataccatggcagttggcatacactgtaactcaagagtgttctatttgtttgtttttctagacagtgccagtttcccagcatactcctgtctctcattcagtaagaaaaagcacttccccttattttccaatacaggacatgatatcccgagttttgagcttcttgttaatagcctgttgcacgctaaccacgcagctcagtgaagagcaagtttattcccataacaaacaggaaacaaaggttgaggaaaaaccacagtggtacccttttgtgagtgttccctaacaccgtcacgggagtcctgattagtctaaatactttacaagtaaatctccttcaggtggcattttataaacaatctttcatcatggagagatgagaattgggtcaggtataattagaatgacagatgtattggctagcctgagagaattaacgcaattcagtaaaaaggctagccaactgcggatatcttctagttacttccgtgacaaattagcaccatcctcttgtactgaagcagtgctttcattagcatgcacagctgtttgcatcatctttgtttgtatttcaatccatatttggagcttaagtgagatttgtcataagacttcagttcaagcttgcttgcctaattttacatgcttctatttagtaaaatatgattactaggtcataaatatttgataatttattgccttattagagtaattttctaaacatgttttttgacgactgcttgccactacgtacaagcacttgaaaaatgttcttttctattaaaagtacatggttccagaattgggaaaatcacgttcttaaaaaataaccagttttctattgtgttggcttttaaaattttttcatcagtagaatcaaatgcaaatattgtctgcttatttttcaacagaatacaagtttgattttaataacttaggctcatgaaatgtcaccacgtagtaatacttagaattacagcaataacttaggctaaaaaaataaagttgttatgaactacattgagctcagacagatatatgtattatgtaaacatttatataaaatgtatataaattgtatattgtattatataattatatattgtaatatatagtatataatatataatttataaatataatacataaattatatttataaattataaagtttttatataatatattataatctaatatattataattatatttataaattataacgtttatttgaaatattgaagttttgtatacttagtggattttaatatttatgtcgttttcattttattccactgttacattaaggaagtaacttattacaaaaataaattatatttgtcttacatttgccctttttactctacttaaaattggagaaaaagagttcaagatagggaatttctgtcagaaaggagaaatagttgtattatgtgaagtttaagtagatattcttgtagagtatggagaaaataatgctataaaatgttgccttttaaaaaaaagttcagaaaatatagttcctagctctctctaaatgactagtttgattgtgactgctttcccaaaatttgtaaatttaaaatttatacatcacatggaatatagttttatttcacatacattccagtaggctgagaatacttgaaattcaatgattaaaaatgaaataataataaccagctttgctttattctaaaaccagctttattctttatttaccactttatttacagcgaattatttgctaatctgttaactttgcttcataagaaggcattataattatcgtacatttgaaagtggagattttctccccattctggttgccagtttcacaactgtgttcattctaaatttattaaaatatgtaaaatcagctttctaaccttggttgtccacaaagaatttcactccaatttgaaatatctattcagaactaattttttgtggttgagcattattttttgaacaatgaattgcataatcattttgtataatccagggagctctggcttagattctgtattattttgtgttatactgatttttagaaaatggaatgtagcgttgacacgagcacaaatctcagcaagggcctaccttacaaagataaaatgcgtggagttttattagaagcacatgattttgctttgtgtttcgtatacaccagcatttcagtgtagtaaatggcattttgtcttgaagagtgagcagagttgttacaaaagaaggcataatgcttccttgccagcagaattcagataagtgaatatcagaaaagctatttgtgatcttgaaagtgtaagaaattcaacatcaataaaggattgtggttccttagatagccatgtaagtctttgcctatgtttctaacatttctctttaggaaatattcttgcttttatttttctgaacaaattttctccattattatctctgatatttactttgaacagaaaggtggattggaaatcaaaaaataagtttgatttcaaaaatgatttcaaaatgttagttttctcagtattttacattttgagaagagaacaaagaaggcagatgaagagttttttgttttttcttaaatttgttttcttttcaactttatttttaattgacataataattacatatagtatacattttgaagatacggttttaattttcacaggaatcttatttgggtttagttatataaggtctaattttgcatcctctacatttagtggctgatttataaatttccactgagtgataatagtaattaatgtgaaacaggttttttgctgatgtttttagaagtttcagtagattaggaaggaagaaattatgctattgagaaaaatagaaaatgtaaacataagcatttgaactctctcttgagatatttttatcttccatgaaactagatgcggcttattgaagatgtgtttcaggtctcagtgctctaaaactcttctacttggtgagcatcttgattggttagatctcttactaatatcccattgctagagagggatgtaaaggaaattttctcaaactgagatttccaaatcttccaatctctgagtcaagtaaagagacaaggttagaactcttaggcaaactgaaaaatcaatattcctatattatcattatttttttctttttttgacaccaagtctcactctgtcgcccaggctggagtgcagtggcactattttggctcactgcaatgtacgcttcccaggttcaagtgattccagtgcttcggcctcgcgagtaggtgagattatatgtgcacgccaccatgcccagctaatttttgtatttttagtagagacagggtttcgccatgttgactacgttggtcttgaactcctgacctcaggtgatctgcccacctcggcctcccaaagtgctgggattacaggcttgagccaccatgcctggcttcctatattcatttttttatgtgggctttttaaaatcttttcaatagcaaagacttgacaccaacccaaatgtccatcaatgatagactggattaagaaaatgtggcacatatacaccatgaaatactatgcagccataaaaaaggatgagttcacgtcctttgtagggacatggatgaagctggaaaccatcattctcagcagactatcacaaggacagaaaaccaaactctgcatgttctcactcataggtggaaattgaacaatgagaacacttggacacagggcggggaacatcacacaccagggcctgttgggggggtggggggttgggggagggaaagcatcaggagaaatacctaatgtaaatgacgagtttatgggtgcagcaaacaacatggcacatgtatacctatgtaacaaacctgcacgttgtgcacatgtaccctagaacttaaagtataataaaaaagaaaaaaaattaaaaatcttttctttgagacaattgtagatttacatgcagttgaaagaattaatagaggccgggcgcggtgcctcacgcctgtaatcccagcactttgggaggccaaggcaggcggatcatgaggtcaggagatcgagaccatcctggctaacacagagaaaccccgtgtctactaaaaaatcgaaaaaaattagccggtgtgtggcgggtgcttgtaatcccagctactcaggaggctgaggcaggagaatggcgtgaacctgggaggcggagcttggcgaagcctgcagtgagtggagatagtgccactgcattccagcctgggcaacagagcgagactctgtctcaaaaaaaaaaaaaaaaaaaaaaaaagaattaatacaaagagaccctgcatagtcttcactcagtacagtatcacaactattaaattgacattaatcccttaacactgctttaacccaagtctatgctgctgcttctccgtgttcacttctgagaggcactggccatttcttgtgtgcttattcatactttgtgtaaaagcattagcatcatacatcgctggtgctgaccctaccctcagtcccagcttctcccagagtaggctaagattctcttttctactacatggaaaattgttctggaataataaagggttagcaaaaaagtcagagaaaacaaacagttgcattccctttccctgtagtagagtaggaatataattatgagtgatagaggatacgttccattcctttcccagtcctctccgaagtcagcttcactgctgtaggaagttgctgttctcattatttccctgagggaaagtgttgggaagtgagagttgaggtgatggggaatcagggttgctgacaattgggggaattataacgagaagctctttttcaccaggagaggggttgcatgttaagagaaggcctatctgctcatcctccatgtcagcagatgagaaccagttggacaaggtagctgtctcttagagattgagaagtaacaaaagcacactgtcagtcctgttcttccagcctcacgtacatcttctccatacattatgtatttgacattaaattaacatacactgttacacccattcctgaccgcattatctcaggtagccttttgtatttgagtattgtgggatctgttgctattgcccatgatgcccacttggactccaccaaggcagtgaaactcttgggggccgttcaaagtcaagagtgccaactgcccctaacaggattgggagaaccaaccaacactccccgaatagggactaactcactcttttcttggcctttatgaaaggaaggagttaaggctcttacagctggagactccagcaagagttgtaggctcaacgtgtagcttatactatttacttaattaacatgtaaatggattttgagttctgaatgcttgttctagttgattagggctcatttagcctggcttctacgaattagctataacaaatggtttcatagctgttatagaatgaggcagaagaaaataaaatgaatgtagcattatgtttaattagtggtataggaaaatgttaatataatgccatttagattctggactggggagattgtgcctttatcataagtaagaaattgttgctaggtttcacataagggcacatagttatcatgaatcatctccttcgatcatcattcttttatcccattacttgacttgcacccatccaaaattctaccacttttatttaatatatagactcataaagacaaggtttgtgcatctgcagagctgtgatgttcactgcgaggcccgtggcacacatctataagaagacacatatttggtactctaagatgatacttttttttaatgccaaaatgtgagggtcagcataaattgccaaggcatggtaaattttgttgccaatgctcccgtgactatggggtgaagggattctgtgcctcccttggtagcaatgaccacggtgcttgcaatcccagtgccaattcccggcacagtgcaggctctggaggcactgctgccttgcagtcttattggaattaacactgcctgagtaagagattaataatgggtattgttgtgtcttagaaacgttaaagagcatgtgacatgaatatgtacacattggtgaaggagatacagagaaggaaagcaaagtgaagctgtagatgtttgttacaactgaaggtaagctctgggagcagagaccactgctggctatagttgatgggatccacaatgtcaatacaaatggggactaactattgttttacttccctatacacgttgctctttcagtagatgcaataaagtactggtaaaaccagaggtggctaccatcacgatgatgtcaacaggagggacagtcagcactaagcccagaaggtgtcaaacactccgcaggagaaatgcgccatgcaacggacatgaagatgatctgacactcttcacgtggttttcagatggaaacgtggctacgaaagcatcaacctcattatcatccatcattaaggccatctcactcagtactgctgctttcaaagtccacgctcccaaagcaaattggatttctgtacacaatactcttacaggatgaaacccaaccaacttgttgacgtaagtatcccatctacttcgcaattttatttatcttccaaaattaaaggactggcaccctgatttattaaaagtgaattgggtctagggaccatatcccctctgagttactgacagagcagcttctggcctgtgaagctcaaagccatgcctagatgtgatggatccttgtctttgattggctaattagaatcaatctgttgaaggaccagtggcagtggctcacgcctgtaatcccagcacttagagaggctgaggcaggtgtatcacttgaggccaggagttcaagaccagcctggcctacctggtgaaaccccatctctactaaaaataccaaaaaattagccaggcgtgctggtacaagggtaatcccagctacttgggaggctgaggcgcaagaatcacttgaactcaggaggtagaggttgcagtgagccaagattgtgccactgggcggcagtgcaagaccctgtctcataaaaagaaaaaaagaatctgttgaatattcctaacttggaagtaatgggtgatgcgtggctttcatcttttagaaaggtgttttttcctctgtcagtaaaactaagaagacatctgtgtgtgctaaggcgtcagtctagcaagggcagggcacaaacccagagagagaattgggctgttgtttcacttccaataaaaatgggatatacatgggaggtagagttataattctactcaggattgactttatacatgcaattggatgggtcactgattgactttgaggcaatcagggatgagtgaaactgatcttggggagggtggcaagacatgttgacaggtaagatgtgttttaatgtataacagtgcgtggtgtgtattaatcagttggagttgattgactgcgttttattgtttggaacattcctgcccaagggtcaggtaaatatacaaaatatacaaataatacagatttttaatacataaatatcaattaagtagcataattaaataatacattgttatagttgtacttaatgtgtatgtaaatatatacaaataatacagatttttaatatataaatatcaattaaatagcagaattaataatacgttgttatagatgtacttcatgcatatgtaattaaattattaatgtataatatataaatacatattttaatatacaaataaaatggtcttaaatcagagttaatttaagaccatttatattagtacatatcttaatatacaaatgaatggtcttaagttaatgtcattgagtataagtcacatttacagatatgacatgtgtttccagataaagtcaatggacagacagcttccaacactggaaaacattcaaaatatatgcaattaattttatatttgagttaaggcaatcatttattaaggaaagcaatcagatgtttgtgagggcttaaactttcgcttcataaccaaagcagtttccttacatgaaagttgacttcttaaaaagagaagtttattttttataatggagaattgttgtgatgtgcagataccttccgtcatttcatactcatctaaaagcagccaaatgatcttttcacctttggccggaatccttttattgctaccgagtcctgcactcattaaaccagatgacagtgcatgctctgagaggtgtaaatctctagtcctggtggccagttaaattcctcagtaaatgtttggtagatgctgcctaataaaccagtccaggttgccactgggaggattaaaagaagtaaacgtgtatacatgaacagagagacagtgccttttcatgctaaatgtggttccccacatctcctctgattagaggtgtgctctgaacaagccgagacggggccgtgccgagcaatgatctcccgctggtactttgatgtgactgaagggaagtgtgccccattcttttacggcggatgtggcggcaaccggaacaactttgacacagaagagtactgcatggccgtgtgtggcagcgccagtaagtggacccttcttcgagcctggccacctttcgtctctctcgccactgactctgctttttgtaacagattgattttcctggttcttgggaatgggcctgttgctaccactaaccacatttctgtccacttctctaattgctcagagtctccgcagtatgttcaatcatgagcacacctctccgtctttccctgataaagcatggccatggatgtgttctcttcctagctgtagcacatatgtcttgcaatccagagggacttttgagtgcttctcttttaaacaaagctggagtggctgttttgtcttctgcagccagccgtttctgcaaatgcatacttatgtgtttgtccgtgtacatatgtgttcatgtttatgcatgtgcactacctgtgcagatactgtctaccactggaagcctggctgatgcagcttgagttgcattgataaggtgtatggctgtgatgaatacctttaagttggttcataacatgtcttttattgtgctgatgagggaatgtgattgaattgagctcatgcatctcaaatgccggagggtagaagtgcccgtcttgccccctccgagctcagcacacagacatttgccaggtcaaacttctgcttcttctcttgaaagtagaagaaaacttttgacttaacgtgagaaactttcaatgacataaggctcgaggaacataattttattttttttgtttttttaaagacagggtctcattctgtctcacaggctggagtgcaatggcgtgatcttggctcactgcaacctccgcctcccgggttcaagtgattctcctgcctcagcctccccagcagctaggatcacaggcacatgccactgcgcccggctaattttttgtatttttggtagagacaaggcttcaccatgttgaccaggctggtctcgaactcctgacctcaagtgatccacctgccttggccatccaaagtgctgggattacaggcgtgagccactgcaccccgccagaacataattttcaaagtctttctcttgaacattaagcttttcataattccgggggataaaaatatgaagtcatgatgacttaagtgcatgatgaaattttccccaaagaggtaattctcaggaggtccagtaccagatgtgagacttccatgtcgttaacagacttccaagtgaaattcccaattgtgcttatttatttatttatttatttatttgttgttgttgttcatgagtaggaagtatgaactactcaagaagtaattattcagctcagcttgataactaaaaatgaaactcaataactgtgtattacttttttgagagactcctgcctaattctccgctgtgttgcaagggtggcagccacatttcctgcctgagattcctagggattatataaattgttttgcagcaagatcttaggattaagcaaaacaacagaagggcctgcaccattaatacccccactgtaaaggagcccaggatctaagaggaatgtaatggaaaagctcctgttggtctcctgccatcgccagtgaatgagatgactgcttcagtcccatgtgtgaacaggtgtaggaactgataacctcaagggctttttttttttttttttctggctctgattggatgattgcagcttctggctcaaaggactcccttcttcagtttcaaacaaagcagtcaattaggtcaggtattgcgaacacaatggagaattctgttgcctgcagcctttggaacaaaggccttttgttacagtgattctcactggtttagccggtgggagaggtttcctggcagatttgcaacttttttctccctttccctgggtggattcattttctgaaatatcatgtatagtttttggtaataagagatttatttggttttaattattagcagtgatgaatttgcttcaagagattaaaattctctccacctcaccccagtactgccatcccttcacctaacactctctccctttgatcagtttgggctgggagtgaccagtgggcacctgtccaggtgtcctgggtggcacacagtttgctgagggttttgcaaaaggtcgatgctcccaacagagatgtattagatgaggctagctatgcctgattttagaggggaaaggtgacagaataatgtatgaagaaggcaaaggctgaagatcagttagatgggtggacaagaataagtagagagtataagcctcagcaaacagccagagccgagagccacatgctgtcctatgaatgagtgaaataaatggagtttttgtgaaaaaatgcatcgaagggaattggggatatttggcacaaaaggagcaagaaatcctcttctgttaagaaacctgttgttactcggatatactatcagagacaaaatatccagcattctcaaatgttaacttcttacgaaaatagatcttatgtttatatgttcattttggttttgttggagggaccaaacctaagtgagtgattttgtttgttaggttgtttttttgtcagtggactcgtgcatttcagccatcattcccatgtttctctttttgtttttagttatgttctcttattttttccatagtgtcccaaagtttactcaagactacccaggaacctcttgcccgagatcctgttaaacgtacgttgtcattcacctgagggaagggaagaggggaggaggatgctgcttggttcacataactccagcatcatcaccttctttgcatggttttgtgtttcttgaacacctgtcttagtaaaatgtttcttcccattaccttgcttgtaattacatctgattttgccagacagcttgagatgttgggctaagaacatcattgactaagtttcttctatttctgaccaatttcctttttatttagtctggttttattgaatattatatggacaacatcattgtattgtatttgccattactattttatttcctaaaagctatcagtgtaactgagagcaggcttagcctctcactgcttttgcagaactgaagaacaagggctaggtgcagtggaaggaaagtgactttacttagcaaagctagcaatggggaaatggtccaggctcctgcctcaaagcaaccatctcaaattttggattaaaaaacaaaggcttaaaaaggggagcttggaatgcagggcatgaaggaggggtgaggaggtgctgctatacaggacttgttccaaagacttgagttattatccagttcggtaagtgggctggcgcatcccgcacaatcgggttgtaaattaactgcagccttgaggtgatctcctgatgagggagaattctgaaggtgcctaagtcagtcagtggaacttctaagcaagcattaataattttaataataattataagcgtaattagataatggaagcgctgtgcagggagtgcctggtgggaagaaagagagcaaaggttaccatttcattactaaaactggaaggaaaagaaaggaagaaagatctttaaaatagagtactcggttacatcaagatgccatgatttaacaagagactataatacataagtaacttgtttcctcagaaaaagtacttaatattcatggtattgtagtacatggactaattcgtacacgcagatttcaatttatgtgtgttataagacccggtttcaactttagacatgaagggtcacttttagacattaggaacccctctttctcctctcccagaaggcataatggtaggttagaggtgctcaccttttgactaggaagtagagaaagagcctcctataaagaaatgcattgtccagccactgcaggccttacttacagtgtcttatgttttgtttttatttcagttgtaatatcagacgagtttagttttaaaatgtggttttagtactcatatttgaatttggattccatccagaaatagatttatccagtgttaggttagggatgatatatgccatttatgcttatgattgctggaagaagaggcacaatttcagttgtaacttagatattttataattagcatttgtgtacattatcctgaaaaaaaaaaaccctcatctcaaaactgatgaagccagttatcttttttaaagatgataaattatagatgaaggattaggtattttaaaaaagactgcatcctaaactataaagttttttaatggcctccataaaatattcagaataattcacattatgtataacttttgaaggatgtggtttgtactgctgcaacataaacgtttcttttgctgttgtgaaaaaagcatttttctctaaaaacactgtaagtacagcaagtgggttgacagactaggaaaaagctctagctattccactatagtgttgacataggtacgcatgttgagttgcattgtaccgagcattttcacagatcatttaatttttcttcagaacactttgtgggcattttcctcattccttttgtacatacgagaaaaaatgaggcttcaagagcttagtgacttgtcccaagccatcgaacatggcaggaccaggctttgaaacccaaaatgacgttttggccgcactccacaccaaatggctaagcattggttctgacattgttttgccggttagtgaaatcacatttgcgattcagaagcacattttaagaatacagaaaacagtgaaaagaggatgaagaatgttaacattttttcctaaatgccatgaatagagcacgcatcagtaaattaaatgtctttcccattcttttataaaacagtgattatttttctcttgtttcattttagcatttataagaattctatttttccatttttaataactgatggaaacaagcatcattgtctgataaatttattttcatgctgtacacgtaactaccactttcatcatccactgttccaaacagatactgaaagtctcttttgtaattttctccttcccagtaattttctccatctacttgcagtgtatttgggatcctgacacctttccattctaggaggatgaagtgctttgggcagctatattttcttgtctgcctacagagactattcaatcacagcaagtgaagggttttgcagtgctagtacaaacagacaaggaaaaaaacatataatttctagttatttatagcctgtgcagctatgtggtcttatttatagcaaactgcacatttgatttgaaaaagtcatggtcatctggaggtcaaattcagatggcagactcaattcagagaaaaggagctgaactagaaggtaagcaagcctgttagactgggcaacttggacttgactttgctccttcaacaatctagagccagttggatgatatttctgcacaaaggtggttggttttacaggttgctcagtctaagctgcttctagtcaaataacaaatgtgaaaggagatagaaaaagctcttcagttgaactgataaaagattacacttagggagaaaatgtatgatggtttgcattataaaaacaataatttgccataaatcaggcatttctaggtttcaaacttttgtcataaaaaccaattttgagcattgcaattttagggacatattttattgttgttattttaaataaaaatctaaaccacaaatataaggctgagagctttcattttattcgtgaacataggaattcaaatcattaaaaaaaaaccctttctcatttgggataaagaatcttacgagagctgagttaatttctgacattagttttgcacctgcccatttgggtttaggacagtgcaaaaggtttcacatttaatcttcaaaatatagtatttgtagacaataaaattatataaatatttgtggattcatttatattttaaatatgagagtgtgaccattttttctggtgctgtctccatcagactgcatcccaaaaggcaaacagaccaactccttaatggcatttaatctctcaaagagcatcatgccaatttttagtcagcagattgcaccatgtgatctggccaaagtgtgtcccatctcaggctccttcatttgcgctgacatgtggtacaaacaactaaaccaaggtttctcaacctcagcactattaacattttgattcaaataattaatttttaggagtctgtcctaggcatatgggtgtttagcagtacccctgacccctacccactaaatgccattaacacaactccagctgtgataactaaaaatgtctctagacattgctaaatgtgcccagggggtcacattctggttgagaatcctgttctagagtagtagtttccccacatctgactcagagatagaactctcctggtgtaaacacgtgtactttccacaaatttgggggcatgttgaaatgttagaatgtcagcatcatccaattctcgacagatgtttgaaattgaatttgttagactattgtccaagctctcaatatttgcaaggtaaagtggaagttgctgttgctgtcctgactatagtattgaaggtctcgtagttttcctgctctaatgtaagctactgtggcagcagaagagaaaccagcaaatcccttagtttgaagtcattggttcacctatgcaccacccctttctcctctctgtttcatcttagtttcctagaatcccaggatatgctggaggacaaccatctgtagagatgtcctatagtcttgctacacaggttatttgtactttaggattatgtttgatggccttatagtttgtgcagaggtgtaggcctgaccccatgcaggattgagggagggaaaaagattgatttctaggcacatcagaatggtccagatgacatgaaacagactggtacacttacagagaatatgaaaagaattggaacttaacaagtcaggccccaagttccatccccaggttccaagtttgttgccgcagaagctcataattttcaaatcgtagaaaactcacaccacgcagcctttcaatggaatatgccaccttaaccccagggtcgttgtaaagacaggagccataagacagaagtctgaatgcctaggccatttaatctttggccaaatttgaactattgttcttaatcacactattcttgttcttttcactgtgcagtagcaaatgttagttcccattagcacattctgcaataccattggaactaaaactgccaaattagattaggcaacctgggattacactttgctccccaaccaacctagggagggagaacaattttaaagcattaaaagatgtgatggtgaattaaactacctgtcacgtcagtgccagtatattctatcagattaacaagtgtgaaaagctaaatctttggtatctggaaatgcttagataggaagaatggctttttcttcaaagccataataattagagatgaccctaaaattgaaaggaactggattgcttagcaactcagcattttttaaaaagaagggccatctactttgaatacaggttaaatatctcttctctaaaatgggaccagaagtgcttcagattttggatttcggaatattgatgtattcatgatgaaataacatgaaattcatttatgtttcatgtacaccttatacaaaagtctgaagataattttatacaatttttttttttttttgagatggagtctcgctctgttgcccaggctggagtgcagtggcgtgatctcggctcactgcaacctctgcctcctgggttcaagagatccccctgtctcagcctcccaagtagctggaatgaatgacaggcgcctgccaccacacacagctaatttttgtgttttttagtagagatagggtttcaccatgttggccaggctggtcttgaactcctgacctgaagtgatccaccagcttcggcctcccgaagtacttcgattacacgtgtgagccaccacgcttggcctatacagtatttttgataattttgttcatgaaacaaagtttctgtacgttgcactgtgagagaacaaaggtgttgctatcccagccaccatgatgtcatgtcagtgctcaaaaattatcagattttggagcatttcagattctcagattagagatgttctacctgtggtaaaagaatgttcattatgtctctgctctgttgtttagctatttgccaaaagagggtaagtggatcgtttaataaagtggtcagcaaatatttttcatacaaggccagattatagatattttaggctttgtagatcatgcagtttgtcataactacttaactatgcagtggtagcatgaaagcaacaatagacaataagtaaacaaatagacaaggctgtgttccgataatactacttttataaaagtagccagcagctgggtgcagtggctcacgcctgtaatcccagcactttgggaggccgaggcgggcagatcacctgaggtcaggaattcgagaccagcctggccaacatggcgaaaccccatctctgctaaaaacacaaaaactagctgggcgtggtgatgggcgcctgtaatcccacctactcaggaggctgaggcaggagaatcacttgaacccgggaggcagaggttgcagtgagctgagatcacaccatcgcactccagcctgggggacaagagcgagacttcatctcaagggggaaaaaaaaggtagccagcaagctgatccttggtttaatacagcaggtttttttatttttatttttattttttttccaatagctttggggatacaagtggttttagttacggggatgaagtgtatagtggtgatgtctgagagtttagtgtccccatttcactgagtagtgtacattgtacccaatacgtagttttttatccctctcctccttcccactcttcctcattctgagtctccaatgtccattatgccactctatgcctttgcataatcatagcttagctcccaatttataagggaatacatactgtatttccattcctgattacttcacttagaataatggcctccacctccatccaagttgctgcaaaagacttttattttgtggtttttctggcctactagtattccgtggtatatatacaccacattttctttatccctcattggttgatgggcacttaggttggttccgtatctttgcagttgtgaactgtgcagcagttatttttgaccccaggatgtgcgaggccaggtattttgagagacaccagcaaaggaatctgagtactggctatcaatacctgataattttattaatgagttgagacccagatatgccgtagaggtaaataaccatataaaggaaatatagaagtgtaggagaagattgctctggaaggctggggtaaaatgaaatcagctttatccttaagacctccatagaggttaactgtaccatctccttttactgctacagtttatatgaaactggacaatattgaagattttgacttttcgaactcatctattgagtgttgagcagctatgacaggttatttctttatgtgcctccattaacgaagtcaagaatagcttctgacaaattgacaaaaaacaataacctaaggttaacccattctggacgccagttattgctattgcttcacatatattttttagattcaaacttgaggttgcttttaagttttagtgtgatgtgctgaatagagaatagatgttaataaaaaaataatgccagcattcgttccttcacattcagttcatatatttgaaaaaattcccatgtcagtatgtgtccatggacataaaaaagaaatgtagcttgactagagtaaacacatcatagattatatttttattaccttatgtccatgtgatgcattgatagtgttctccaccaactatgattgcactgactataaaattgtaatacaagggcatattagggggagaatgcctttgttttttcttttgttgttattttgtttttaagagagtctggtattacactggaggatcacaaactgtattttcttgttataaatggctcctctatcttggacttaatggttaggataaatatttgaatgtagaatgcgttaggagttttaactatttttgaaattaggaaaatggagagacactttttttttttttagagacactttttttttaagttataataagcatggcactcggaaagctctgccatgtttcaagattaaagtttcacatgaacgctaacaagtttatatttcactcatatataaatgatcctccttgtctcctttcctaaattatagccatctcaaatgacaacattgctgggtcggtatcaaatagcattttcaatgataaggcaatgatttatataggtcttaatttgttttaatcttctgttaccaaggctgtagagataaattgcttttctgctgatgaaaggagactaacccaattttcttgttagaatctaatattaatatatcgactgaatgccattcataagccttggtttagggaaacattcagccttctggcctgttggagatggccacggtcattgctgtttgaaggtgggtcatttcttcttttgtgtcctgagtccattgtgactgtaaaattatgggtcaccccagagcctgaggaaacaaatgcatatcaaaatgataggggcaatctttcacagtgcctttaattttgaccccacattcttatatgaatgtgaagtaccacattagtatgaatatgaaatggagtgctccgcaatgattacaaaatcagaactaaaatgagggaaatcagtgcatgtacagttcaacttaatggattatcctctaaggagtcttcagacaggctaggagagtgacgtctgcctcatcctgaagatattagcaggttttcccctgttttaaagtaacttcccttcaaatgctaacagttttctcagaggaaacacaggtatggaaaatgtttcgttggtgtcttggccccagtgatggaggagcattttgtgataggaacgttgggtgcagcatcgccatttatgaataaactgaaagctaacctgtgttacttcaccccagaaaacagagctctggcaggtattgagaatagatcacagtgtgaagtggcagtattgtgacaagcatgcgtgtatcagtattaaaattgaaatgagccctcacgcacatgtgaaagcagtttctcccgttttcatattcagttccctgaggtaatacagcattttggtgtgagagaaagaagggaatctgacccttctcgtgtgggaagggggctgagggcaacaacctcctgtgacagccaccctggtccaagccaccttcatctttgtctcctttttttttttttttttttttgagacagagtttcgctgttatcacccaggctggggtgcaatggcacaatcttggctcaccacaacttccgcctcccgggttcaagcaattctcctgcctcagcctcccgagtagctgggattacaggcgcctgccaccacgcccagctaattttagtatttttagtagagacagagtttctccatgttggtcaggctggtctcaaactcctgacctcaggtgatctgcccgcctcagactcccaaagtgctgggattacaggcgtgagccactgcacccagcctgtcttttcctcttaaaagatcttccttctacttttgtcccatagcagccagagtgatccttcaacaaaacgccccatcacatatactccccctcaaacagcccacgctggtccctcagaatccttactgtggctttaaggctgtacatgatgtcccccatttcttccctgcctctcccactacttcctctcttgcttctttagctctggccatgcgggtctcgtggaatttgccagccagcttcaactcttagggcttccgtgctagttttgtcatctgcctgccatgtccttccagcagccagctgggaagatctgaatgtcacctcctcacttaagactctgcctggtcgctcacttactgcggtctacctttcccctctcccctcagctctcccgatccttctgaactctgctctgtttttctttttcctctttttctccataatacaaatcacatattaacaatatgacttactggcttttaaaaaattcttgtggtaattgtttctttccctagaatataattccaccaggatcagggccttcatgtttttctcattggtttctcccatgtgcctcacatataataagggctgcaatgttggtgggctggaggaataaaagaatgaacaggcgcactaaaggcaggatagtttgtccatgtcagagctgctgtctcagctgctttgatacctctgacttcccagggtggcaaagaataaggatgtggcttatgtagaaggcgttagtcatccaaaatgccactgtatatttggaagcaaatattcaccttgaagcagtgatgtactaggaattagaactgcttttctgttacattttttcatttgttatgagtgtttagatacacatgatcactattaaaaggaagggaggtaatagcctatatatcctaccatgcccctcaaggctctgttaggagactaaaatacaaaggtcatttaaaaagttaaaagcttatgcatgtgatgttggtattgctgctaatgactaggcatctagaggtcaaaacctagagctaaggatattgaaccctgtgttttgtctcgttttaagtctaggtttttgtggaggggggaacatacctagccagcttgcttgcagaaggcatgagtgagcaggctgaaggagggacccaaggccagaacgtcctccatattctagctccatgggctctttcacttgatccctgctttatgacccaacttctgttgaaggatttgccagatagtgtttggggcaggaacagctgtttcatagaaaacaagccaacggacatcataacaaagcatatggttgttttgccaagttgtgctgctcattaacaaaacaaaacaacaaaaaccctttacagtgccccagcatgtggatggattggccctttactactctaaaaattagctttacagcctttttatggcttacccaatcttaacagactttatttgtgtgtgtttagggatgcaaatgggtatgttaaatgatagtgttttgcctctacgcaataaaatagggtaattttttcttcccatgtattaaacgagaacacagaacatgcctagcatggtgggctctgatgaaaagaggctgttatcatttggccaacatggaaatcctagcctttatttatttatttatttgagacggagtgccaacatggaaatcctagcctttatttatttgtttgtttgtttgtttgagacggagtttcgctcttgtagcccagactggggtgcactggcatgatctcggctcaccgcaacctccgcctcccaggttcaagcgattctcctgcctcagcctcccaagtagctgggattacaggcatgcgccaccacaccctgctaatttttttattttattttattttagtagagacggggtttctccatgttgatcaggctggtctcaaacttccgtccacctcggcctcccaaagtgctgggattacaggtgtgagccaccccatccggccgaaatcctagcctttatcagaggttccgtggaatctcagaggtctgtgagcaggataaactgctttatggtagtttaaaatgcaaaaccagaaataaaccctcctaaagccagtttgtttccactttctaagtggttacagtgacctgtgttttaagtaccttaaatatatcagtgacctgctgatatacagcttcctgtttcctctgtgtcctgtgacatatcctgacattccttgagccccactcccttcccaaaaggaagtaccttgatgggtgaggacatagggcacacgtgtctctggccttctgtggacataatcacaaaatggtagtcagtcctatgaatttaatctctttaggatataaggatattcacgaaatagaagttgagctctctggacatactccaccttaaaattgctctctccttccgggatcctcaccagctgcagagcagtagtaatgaactattaaattcatttaacaatatcagcatatgctatccttctctgcttgactagacagtaatctggcttgctggttggtatgaatataggataatttcactcacactaattgagatggggagtttgtatgaatggctgaaaaatttgagttaaagataaaaagagacacagcttcctcaactatgggaaataactgggactgttaacaaagatttacttgaagagaaattgtattgctcagggttctccagagaaacaggaccaataggatatatatgtataggaagagattgattctgcagaattgactcacacaacaattatggaggctaagtcccacaatctgttgtctgcaagttggagacccaggagagctggtggtatgatttagtccaaatctaaaggcctgagaaccagggaagacaatggtgtaaatttcagtccagggagaagagaagaccaatatcctgactcaggcagccaggaaataaaaagggtgaactgctccatcctctgcccttttgttttcagaccctcagcagatcgggtgattcctgcccatgttgaggagggtgatttactttactgagtgcaccaattccgatgctaatctcatccagaagcaccctcacaaagacactcagaaacaatgtttaatctgggcaccttgcggcccaatcaagttggcacagaaaattaattaccacagaaatatttctggattcaatggattaagttggtaatatagtattcatattcatttccacgtgcctaaaaagaaggtttttatcctttttaatatcctcagtcctattaaacatacctcacattcatgttccatggttattctcttattatgttgctaagtgcatttctacttaggccaatctgattatagtgattcagattatagtgtttatcttctttcctttatacagtagacagtgttcgcaaaccataggagctgaaaaaatttccttcttatatagtaagttttatgattccagttttccaaaggggtgcttatgttatggttataacagttacagccagatgactatcttcatcagcaggtataaccccaaatatttatacattttcatttgtttcaaacataaaatatggtttgcctaaacatgtcattctgccagattggactatgcaaaagaatgttactgttttattttctgcttttactttaacttgttctcatttgagctctaccagttaagatgagaagatgactaaagctagggaagcacattttaaatgctaaataccatgttcatttcaagttgggaacttgaaatgcaagtatttttaacttaatcattaagttaaagtcagtaagaacgtggtatttagcatttattcattttaacttaatgattaagttaaaaatacttgcatattggtttgcttgaagctatggagaaaaacatttaccttttttccaaaaaggtcttaatattcaaaattattgtttcaatcttacaaattaacaatttacttatttttgatactttcggccttttttatgtgggctacacctaacattttttgaaaaatacatactgcttttcctgtaggttgcactttgtgatcctgtgtgtaattcattttcagtggttctattttatttattttttgttagtttgtattttcttttgtttctttttctcaatttttaaaattttaaaacttgtccttttcttttttttctttattattgcactcttctaccaaaacattttcagtggctttgaataaaagtatcagaactttcccgtggttagcattagctctgagatttgaacaggatgtattaagcagaggaggagggaaggccactaacatgtatgagctccactgtgtgtcaccctctctgccggatgacttacatgtggtatggtatctcattttcccagctctcctatcatgtcctgcggcatgttatcaccacttgataaaaaaattgaaacatggagtgcttaagtttcctgccccaggtcacagctgatctgaaaaagaaatgggattcaaatccaaatgtgcttaattgcaaatccccacatgactctttccttccttccttccttcccccgttgctgccaatgtaagaaggaacaccactccctcatttgctacagagaagacaggggcagctgtgtaaaggcaccaggaatatgccctgcctccttccttccacttgaaagcaacatctggatagacactcaactgcttttattttttgaaaaatgattattaatcaggattgaagtggagggaaaaaatcaaaacgaatgtttctttttaaaatgaaagatactgtttaattatttaacagccttccggttttagttaatatctttgaagactttggattaagattccagacattttcttgaaggatgtagaaaacgtatttaacttcaagtttagtttcaaaatgacttagctatcaattcttctcattgaagtcctctttgagatattatatcccaaatgtaatacacaggtaataattcaataggaatacttggaacattggtgatatttgaataaccttttgaatgaaacaattgatttgatctcaaaagatagtgaaaacgtctcattttgttttttatgttaaatatgcttcctcttaagtcaaaattcttttttctttttgcttttaagctcataaatactctgaattctcactaatcttttggaaaattgcttgtataggtattataattcacttggctcatgagttacataatatagcagtatatgttgcaattcaaatattgcttagcagtattagttgaattcaaaatagaaatcactttctttttgacaactagcataatgaattcattgactattgtcaaatttatgaagacagaaaagtccttttgtgattcaaaaatgtgtttattgatgtttatatatcttttgtcgtgtttccatactgtctcatgaaggttgtcttcgtaattcagttatctaaatacatcatacatttaccttttccctggggtgccgttattctacaacaggctaattacagatatctgtggtttctgcaggagtcttagtgtatgatattgatgatatcatcatttactttcaaaattgcaaaatagtaatttaggaaagcatggggatttggaaaaacatgtcttcagcaccaactgtttttgctctttgcatgcttgtttcgtaaagaactctaatgctataattgcaaaatggaccattttaaagatttttccttcattctgtacttgggagtggtgaaagacatccttactgtgctgcacagtgtctcatggtgttctcttaaacagcattaacgtcttgtatgcgctgctttactaaattctctgttctgagaaataactgaaaatacggctttctattaaacgagtggattattctgttgttgttggcttttttttctcaaacctccttctcttctactttatagttcctacaacagcagccagtacccctgatgccgttgacaagtatctcgagacacctggggatgagaatgaacatgcccatttccagaaagccaaagagaggcttgaggccaagcaccgagagagaatgtcccaggtaagtctggctcttccatcattcagccctacgatattgggaaacctgagcttgcctctgcctcagtctccccacaggcctgctggctttatcaagatctttaaagatgtaaagttctaattttaaatgtttactgtgtgggcacagtttgtgggttttttgcatcctccgtgaacatgctgcctaggaaggatccaggtatagttggattttgtaagcacaaattaaatgatgtctgtaacattctctctggcgaagaaaggtacttggcattattattctgtgtatatgtagtacctgtaatcaacatgttgtaaattaaaatccatcaaaatgctctttagtaaagatgaggttttgtattaaatcccagactgttataattgtgaacctacgattgtttacagtctgtaaaatcatagagacttaaaactgagctgaaccatagtgattatttcatctagtctcctaagtgatacatagtggaatagaggttcgagagagtggcttcccattttagcacaaagcaaaatcagtgagccagagacaacatttagaatccaggcctttcttgctcctagtacagtactcctttcattatactttgctgaaaaaaaaaaaaaaaaaaaaaacctgttttggtttggtttgtttttttttagcaggtccttaattaagcaaattaaaaaataacttatgtctaaaacatggctaatccatatatactatcaactacaattgaagctatgtctgctaccaggcactggatgttgtattggagtttgataatatggaggattttagcccttgctcagattcctcattcattcattcattcaatcaacaaatatggacttattattttccagtcacttttctgatttgtagtctacaaacctaggagtgaatgtggggggaaaagaagtaggacataaaagtgaatgaataaagatctcaggttaaagtaagccattcatttttagtgttaatattctgtggcaaatatcagaagataggagaaatttttgtcttagcacagatgcttaatctcttgagagacattaaatgcaatttatgaattagactgctgcgtattttctaagatcacagtcagtctttagtagacaattaatctttcctgtaatttctgatctgggtccctgctgaccccaggaagattcctccctcccagggccaaatgaatggcccctgagcatgtctttcccatgcaaaccagtcaatcaaaagctccttactcccaaccaccttcttatactctgggccactattcacctgctctaatcaccccaggaccaggtaccagaccactagggacaacctcatgccccatcaccattatttgaactaatcagtcctaaacccgcctaccctgcttcgctcattctttccatgaaaaccacaataaaaggctcttgctcatgttttcccctcctgaccaaccctggtgcttcccatatgaccctgcatgtagtggcatgtaccggcttcttgggagctgagtaacaaactgtcttttccatgataatcatctcctgacctcttggcctcacctgaataataagaaaatctacccttgaaaacataaaactaatagtttatctagaaaggtacaacacaggtactgttttttgtttgtttgttttgttttttgtttgtttgttttgccttaagatgaataacaatacttggatctactttggtataataacataaagaggaaaaaagccttataatcacagtacttttggctctggaatataatgtgcagttctagtggctgcccacgatgaaaacctaacagctaattgaactagaaagctagccacagggaattattaagttttcacctgatgccaagaaaatcagatctttccttaggaaagacacaggcactgttcggaaagcattggaggactatgaatcatacttattgccactgaaatgtcctcatttgaatttacatcctatctcccttctttatgaagctttcagaggcttcctgtgccctcacaaatccacttctgggcacatgaagtcgtaaaaaaagaacaatgacaaaaataaacaccgaatgctcagcttgtcattttcagcgcctaccactgtaccctgactctggtcttcctaccacctcttccttctcaactgctacccttgctttctgtacagcgttaagctgctgttctgatcaggccactctgctcatcgtctgttcatctcatcttgggcttccctttgcccttggcattgagttcttctggaaatgccctcccactcttcttcacgctgacacatctcacccattccttacaccccacttcatactcagaatgagacaggcagtcattgctcttacctttcatttaattctaaatatttgctccccggttttgttagtgatttctggacacacctgcattatctttccaagctggatagaaaccttgagacctcaagtcatgaagcctgctacctgcattcatcgtggacccactgtagcattttttttaatgtgtgtttttttaatcctggattttttctcctagtatatcttgttcatttttgaccttattaagaaaacttatttcaaattctctgttagttttagatgtgacaggtcttctttaaaataataatttaacttttagcacatctgtgtaacttgtgacttagttcatgattttgtagattttgttcatcttttagtcatcagatatatctgatataacctaagagatgttgtcccagagcagagaatgttgtctactagattccagtggtcataggaatgtgagacacctgaaatcaatatgtatcttcatagtctgtggtgctgaaatctagggacttttcaactttaaacttgcctgcctcttaaatctctacttagtagtagtcattttctctgcatgaaacagccaagtctttgaagattgataaatccaaatgaaattgatacctttgtgcctgcagtggaaaattgctttataagaatccatagagccactgcaagggccaggtcctgagaattttaaattttaaaaattgtgcggttttttaaattaagttttattgtagtttttgttatatgttttcttacaaatacagaggattttggaattttttcatattttggtttgttgttgccattgtggagtataactctaaacctgtagatttttgttgctaaacctgtagatttttgttgctatatgtcgtgactagcatctagtcaaatagaaatctacagctgaaccatgtgtgagcacttttattacttataaacttactacttttagtatatgcttaaaatgaagtccttcaaattgaaagctgacccaactcataggtttttatttcttttcttttttggagatggagtcttgctctgtcacccagctggagtgcagtggcacaatctagactcactgcaacctccaactccctggttcaagcgattctcctgcctcagcctccccagtaactgggattacaggcacgtgccaccacgccgagctaatttttgtatttttagtagagacagggtttcaccatgttggccaggatggtctcgatctcctgaccttgtgatccacccgcctgggcctcccaaagtgctgggattataggcatgagccactgtgcctggcctaggtttttatttttaagataagcagcaacattttaagagcgcccctttctcctgtcactaaatataaataaacttagctcacctaatgaattttttattttataataaaaaattgggtaccacagggtacaaaaacatgatctttagagccacagagatcttggtttatattcttccctctcccttttttacctgcatagcctcgagctggtaccttaacctggttcgtaaaatgggatggccctggctaatctcacaagctgttgtgaggaatcaattaaattagatagattttgtaaagctcttaatacagggtcagcagtaatgctacttgttatcagtcccacagtgaaattcactgttcacagggagatggtcagcctacatatagtgtgtattcatttgcagtagagtcttagtgggatggtgcaggtgatttgtttatttgtgggggtataggatattgttaaattgttctgaaaatcaaaatgtgagttaatttctatagtaatgcttatttgcaactcattagctaaataaatctctttaattatttcatggattcccccagcttaaagcttaaagtccagtttcttaaagtgtatgaggtaaaatggaaaaaatgtaaatgtaatatgggaaatcagttctcacattgcagtagaacattgaacttctatctcaaactaattttgagattccttgcttgaagaattgttggtagagtaccaccactgtgaacattcccaaagcaggaaattgaaatatttatattgcaaggcttatctcatctataaagcaaagatggtcttccatttcccccttgcccacaggttccctttattaacttggtagaagcaccaaagcagatgggacaatatgtttcttttcttccatgttctattcttgttcattgcagcagggcatttgtcccaattttgctgtgaaccttgagattatttttgatatgcttttcaagtgtaatgaaatatttattccatcttgtttcctccatggttttacaaaaacaacaagaagaagctaattgcctatcatatacaaagaatgaatgccaatggacaataaaatctgtaattaggaacccacatggtgatttgatatagtattgtctcatagaagtcttctatctatagttatttattccaagcctctttttctttcccatcttgaagtatgttagaagagtctattccttaaggctaagtacctacaaaaaacaggctcttataatacagtaatcaagttttctcatgctttgggagtacacagagtatgcaagtacacatctggcaccaaaccaatattttgtttccttgatctttcttcattttacctagttcagagttgcacttcaaacaaattctacttgtcatacacttgaaaaggcagctgtaggtggtaggaagttaatattttctttgaacaacatacagaggtgcagacttttactttttgtatcaggttaatgagtgaacttctctcagggaaatccaggtgaacatcaaagttgagagcaggaagcattgatttcctacaaaacacattcacctgatatcttagtcagtttgtgttgctataatagaataccccagcctggataatctgtaaagaaaaagaagtttaaaattcggctctcagttttgcaggtggggaagtccaagaacatggtgctggcatctgttgaggacttccttgctgtatcatatatggtggaaggaagaagggcaagaggagggcaaaactgagttttataacaacccacttctcacaataacaaacccactccccccataatgatactaatttactcatgaggacagagactgaatcacctcttacaggacttacccctcaacattgttgcactggggattaagtttccaacacatgctttttaggggttacattcaaaccatagcagttggttactaaattagtgctacttgtaaaaaaatacatgtttgctgcattcagaatattacatgttttcttggagtttttggaaggacttagcgtaatccttgctgttcatgacttaggttggcaagctcaaagggccttaattccccatcagttctttaaagggggataggtcttaggatattagacagcagaagtcttctttttcttcccccattatgtactgctttttggcattgtattcatgacacacacacacataaaatgtcatattttctttaaagtcaaaatatacagtttaaaatggtttcagttgctttcataagagagtaaaacttaggtgttcagtttaatattggaagaccttgttcagttaatgtgtgccttccatgaatagttggtatttgttcacatcaaatcaaatgactgtcagttctcggggtaaaaaaagaccaaccttgactcaaaaagctatattcctgcaataaatatgaacatttatgtttaatatactgctgtgattaattatttatatcctagtgggaggtcaaatattcttcagataggaaggggtatgtaataaattttttaaatatctaaaatgacaaaaatagaggaaaaacataatcatccatcctattaagtctgtattcaaaggatgaactgatgattttaaattcaaatgtttccttaatttataggtcatgagagaatgggaagaggcagaacgtcaagcaaagaacttgcctaaagctgataagaaggcagttatccaggtaaaacctgaacccatttcctaccaaacatcacatgccagcagtctttttaatgagtgtctgcaggtttacctttatctgccagcacctcacgtgtgattgttcatagtcccatgaacttcagctgttcttaatcattgtctagtaattgagttgtttaaatcctgccttatatttgctcccaattatttcaagttataattcattgccataaaactcacattgtaacttgcaatctactttttattaataatacatcttttcagtcaccacaatcttctgctgcttctccctccagcaaaaattatgagaatttgaatttttgatggaaaccagtctcaaaattaccttaagtaaaccaacagtttattatggtcaattacttgaggtactgttagtaagagagggatttttttttaatatgtaatataagagtttcaagagtgcatatatttatccaaagttattagtcaaatcagccttcagagagcctatgaaatactgattttcaatgagaaagtaggtttgatgagggttggagagtgcaagaaagtgaagtaagctataaaacgtagaattagtcaatgttggaatgactatgcagtctttaggatactttttagcactagaagaaaatggaataggatgtcttttttagaagacttgaaattgctgcttcatcctacttattcagtccccatggacatatgtgtttatgatggcagcatttccaggagaaagtggaatctttggaacaggaagcagccaacgagagacagcagctggtggagacacacatggccagagtggaagccatgctcaatgaccgccgccgcctggccctggagaactacatcaccgctctgcaggctgttcctcctcgggtaggtctcgctgcagccgagttcacacttcaggtcacagcacagacagtaagggtggggcactgggaactggaagccatacaaaaagaatgaggagaaatgccttgagcactgttattcagaggttcaacccctgtccattccatcttgaaggtcaaagggtcacagggcagctacctccacaaggtcatctctacacagcaggtactcacacttccccacagagcagccagacaggactcccagggactcacattgcaagccctgacttgatttaatattcctgaggtggtgacaattgatggcatagttcaagttcgaacacaaaagctggaaggatgtcttccagtcccttcaggctgctgtaacagaataccatagactgggtaccttatcagcaacagaagtttatttctcacagttgcagaggctgagaagtccaagatcaagacatcagcatacttggttgtctggtgaaagtttgcttcctggttcatagaacttaaattttgtttatcttttatttattttatttttgtttttgtttgtattttgctgtatcctcatatggtggaatgggcaagagagctctctgggccctcttttataagggtactaatgtcaatcttgaaggctctgccctcatgcctaattgtctcccaaagctttcaccctcaaatagcatcacactgtggcttaggtttcaacatatgaattgggggtgggagagacacaaacattcagaccatggcaaaggattttagaagtaaccttgcccagccccctcatcatgtaagtataataatataactaaggtcaaggaaagttgagatttggctgagttgtaagaatttttagtggaccagaaagaattagaactcaaatttccatctcagagcagtggccatattctctgtggggaagcatttgtcagtcatgacattagcaatgatgagacttattcatggttttcagtgatcattgccccaaaaaggcatgttgagtggtacaggcatagatgtgttcaccggcattctgtgggagagcttacttggaatggaaggaactttctgagcatgagtgtgtaacttatgtccacttgttctttttttttttttttttttttaaatgagatggagtctcactctgtcacccaggctggagtgcagtggtgcaatctcagctcactgcaacttctgtctcctgggtttaagcaattctcatgcctcagcctcccaagtacctaggattacaggtgagccacgacacccagctaatttttgtattttagtagagacagggtttcaacatgttggccaggctgatctcgaactcctgacctcaggtgatccacccacctcggcctcccacagtgctgggattacaggcgtgaaccaccatgcccagccatttgttctttctgtttgtcattgagcaagggatattgaaagctctgcctgtgattgtggaccgggccatttttctaaacagtgctatcagtttttattttgtatagtttgaggctgtgtttttaggcgtgtaaatgttccaggctgttaggccctccttgagcctcttcttatgaaatgatctttttatcctttgtaatgttttgctccaaaatctactttaatattaataaagctattccagctttcttttgattaatattaatgtggtgcatttttccatccttatactcttattgaccttgtttgtctttatatttgaagtgtattttttgtaggcagcatgtaattgggtcttgcgttttcctttggattgggaagaccatgtacactgaatgaggttatggatatggttgtcactgaatctgtcatcttgatatttgtttgctatttgtccagtctgttccttgttcttcttttttcctcttttttttttggattaattagaaattttttatgattctattttatctcttttgttggtttgtaagttacaactagtttgttattttactggtttatctcctttgtgggtttataagttataactagtttgttattttactggttgctttaggcttatagaaaacattctaaacttgtcacgatgatgttatgtcagttcaaatgatattataccactccacagacagtactttacaaaagtacttccatttttcatctctctctctctctgtaagcggttgttgtcatactttttccttactacattgttgatgtttttctttaaacagttattttttaatgagttgtaaatttaaaaaaaaaacaacatgtttacccatgaagtcatcattttgggtgctgtaaactctttgcgcagatccagctggtatcattttccttctgcctgagagatttcctttaaaatgtcttagagactgggcttggtggcttgtacctgcaatcccagcaactcaggaggttgagataggagatcacttgaacccaggagttcgagactgcagtgagctgtgattgcatgactgtactcccatctgggtgacaaagggcatcctgtctctttaaaaaaaaaagtttgagtgcacataagttggtgatgaaatctttgtttggctttgaccaaaaatgtcccttttatacctttggttttgaaaaatatttttgctgggtaaaaaatactggattgaggtttctctttcactgcctgaaagatgatactctgctgtcttatttgtgttgatatctttatctttatttctctaaaaataacatgtcttttttttctgtttttacagttttctctatatcactggtttttaacaatttaattttgatatgccatggtatcattcagtctgcccttaattccatctggccgtttttcatcttatcacctcacatactgtagttgttgtatatagaaatttaacctgggctacccccaacacccataatatcgtctgtatcttaacttttgaacctatggaatacagttattatatgaaaactgtttaaatatccatgtttgctaattctaacatctctgtcaactttgaatcaattttgattgcttattattacatgtggcatttccctgtatcattttatgcctcataattttttattaaatgtcggacgctgaatttaaacctgttgaatgctaggtgtttttgtaatattcttgagcttttttctgtcacatagttgagttacttggaaacagtttgatccttttgagctttgcatttttagatttgttaggtgggatagaagcagttatcagcctaggactagttattccttactagtgaggcaagacccttctcagtcatctaccatgaatgttaagttttctcacctgactcgtgggaagaggcattattcctgtccctgtgtgaacaccaagcactgttaatgctaattctttttggtgattttccccctggcttcagtttctttcacatgcatgtacccatcattactcagctatattctcagggatcactctgcacatctctggattctcttttggagcaactctctcctcaccaataccctgtcctgtgaattacaactaccttgatctctccacacacttcatgtcctccactccacgagtcctctaggctctgtgtgggtttccccacctgaaaccatgacctggaaattcagggccatgagtttggcagctgtaagtcctcatttgtttccccttttcaggaatcagtgtccttcacctgatgtctaatgtcttgcagaaatgttgtttatgccaggtgtggtggctcacgcctgtaatcccagcactttgggaggccaaggcgggcggatcacgaggtcaagagatcaagaccatcctggccaacatggtgaaccccgtctctactaaaaatacaaaaaattagccaggtgtggtggcgcacacctgtagtcccagctactcaggaggctgaggcaggagaatcacctgaacctgggaggcagaggttgcagtgagccgagattgtgccactgcactccagtgtggtgacagagcaagactccatctcaaaaaaaaaaaagaaacgctgtttgtatatgaatatattgtccagttattggtggttcaggcaggagggtaaatccagttcttctcactcaatcttggctggaattgtttgtgcattttatgcaacttaaccagaaagtcacccatttgcaccgattttcctcaccattttgatttttctttctatggataaagttacagtgcacagaaagccatgaggagccgttaaagagctcgtggcattcttccaagacgtaagatactatttaccctgttctaccgatgatatcactgcaacctcgggagatggagcggctggttcagggtgacactgctgggaagggagagggtagagccgcgagtcactgtggtgccttctcactagaacgagcttcctctctaaacaaagagcttttgaaaaagaatattcatattagcgttttcattttctatttgccaaaattctctatcttagcaaggcacttgtcaggaaatttttttttatatctctgcagaacaaaagttccttggttcctctcttttttggagaacacgctttcaggagaggagccgtgtgatcatttgccagagaaggataggctggtgggtgctgagaccagaatctttatagcagaaacttgtgaagcgttccagctgaaagtccaatctctaaagtaagatctttgctaaatggacattgatgggactaaaaataagctgagggctgaatggaggctttaacaaatgtacatttaaactctcagtttagtctcatcagccatcacaggaaaggcagtggcaagaatgtttgccgaagtgtcatcttttatcaaaggggataattttagagtggttgtaatcgtgcttattgtgggcctccgcattgcttcatatggaattaggcaacatgttcatttgaaaaaaaaattaaaaactggattaggaagaaatattttactgtcaaaaatcagatcactgttgttgattgatctaaggattcctgttaaattcttaactcggatttatttatttatttatttattttctctctctctctctctttctctgtttctctttctctcctgccttccttccttccctccctccctccttccttcttcccttcctttcctttcctttccttttctcttcccctcccctcttctcttctctaatcttctcttttcttttctcttttcttttcttttcttttgttttcttttcttttcttttcagggtcttgctctttcacccaggctggcatgcagtggtccagtcgtagctcactgcagccccaacctcctgggctcaagcaatccttttgcctcagcctcatgagagttgggtctacagaagctccaccatgtgtggctaatttttaaaaaatttttgtaaagacagggtctcgctgtgttacccaggctagtcttgaacttctggcctcaagcgatcctttcacctcggctttttaaagtgctgatattacaggcatgagccaccatgactcacctttaaatctttcctttgtaataaaatgtggctgggtggtcacaggcctggagtctagggggcattacttgccatttttgttaagttaccatctttaggtgttcatttaagttttaatgttgtatggcttgacctggcacttaggtctgcactttggcaggcacaagaaaattgtaaataccttcttttttttttttttttttttttttttgagacagagtcttgctttgtcgcccaggctggagtgcagtggcgtgatcttggctcactgcaagctccgccttctgggttcacaccattctccagcctcagcctctcaagtagctgggactacaggcacccgccaccatgcctggctaatgtttttttttttttgtatttttagtagagacgggctttcaccgtgttagccaggttggtctggatctcctgacctcgtgatccgccagcctccgcctcccaaagtgctgagattgcaggcgtaattaaatgccttcttgaggacttttataccttcctcttgaagacataaatccagagcttactggtggttgtctgaaaaagatcacatcttgtaataggagtcatacataaatatttctgagatctccctcatacttaaccaccgtgcctggaaaatgcagacaactgtattcagtaaatggtatttgaatataagtaaatcaaaagtgtcgtttccatagattctgtagatgttaccacttagaataattacctgtctaacccttaacaaattctaccgtatattctcagactttgcaaacacgggattccaaaacaatgtggattgttttcagtttctttgaagctcagatttaaatcatacttttactcagtttttaaacctaaacgtggaagtgttatgagatgttgtttttgtgcagctagaattccttgttctactaatgaatttcatttcctgagtccctgtgtctgagtatactgtatgtttcaaatttctgatttagttatgtacctataggcaaatacactgaatggtcaacctaaaaatgcattgtttgactcatatttagagtcatacatatataggcacatgtatttaaaataaatactttaggctagatgtggtggctcacagctgtaatcccagcattttgggaggctgaggtgggaggatcccttgagcccaggaatttgagaccaccctaggcaacatagaaaggccctatctctacaaaaaaaaaaaaaaaaaaagatttttttaattagccaggcatgatggtgcgcgcctgtagtcgcagctactctggaggctgaggtgtgagtgtgaaccaggaagtcaaggctgcagtgagctgtgatggtgccactgcactccagcctggatgacaaagcaagacgctgttccaaaattaaaagttaaaaaatgagataaatacttgaaatattacaattattaaaatagttgttttccccatgggaaaaaaaagttgagcagagctgtgtctttgcactcagaaaaaactcttactctgttgaaggctagtgactcttctaaacaccaaccccttcacctttttactttccttagactttctttggaaaatcaaggagttagcactttttccccctggaagaattaaatgcctctccagaactgcagcacaggaggttaacttctaccacctttggaggcctgcaagctaccagattaaatacttaaagctaagcattcatcatttcttaacctgccctctacagtcatgcacttcctgctttttactttgtcagggctcgtactcaaactattcatagcttcatgaaacaggaactaaatgctgtctgagcctttccccttgtaactctcagcgttctgcttatccttcatagacagaagatgatgatatgtcctgactgttgaagagaaattagacttaatgtgatcctgtacagttaaaccaaaggccagatagggattttttatttcaatcaactttctattgtaggcctaggtttggaaaaccttagcaccccctaatttgtaagacttgaactgttttaaagataagggatacacagccaaagctttctttgtaattctgagatttttggtgtttttacagatacttagtctaaatctttcatcagacagttatcatgattattattctgacttcaacaactgcattttctaaagggaagtgagaattaggaaacattttcctgtacatctgtttatctatcccagttgtgttgtttggattttttcagtgtcttaacgattgaaaccatcttatccatactgaaattcatttcatgcttctatctgctgcttcacattcaggctatcagtttaattgagcaaaaaaaaaatgttggcagtttctatagcatcggcatccttctttggtttctcatttttgaatggttcagccacatgttaaattttgctgagatctctggaaacttcttcacataattctttgatagaacatgaattctgtgagactcttcattaaagagcacggtttcatcactaagttgagattttgctcaaggctatttggtaaattccagcagaagagcaataaatgttcaacaagaaacagccgtcattggagataacaagggtagacattaatgggaggtttgtcacaggtaaacaggtgatggcatgagaaggtttaaaccacctcataaataaatttttcgccactatatgatgtggattacaactaaaccaaactttaaccaatgtgggtgttggtgtacctttcttttctaaagcaaaaaagaaattgtggtactaaacttgagcttttatatgataccgctaattgcccttcacccaacaaaccaattatttctacccatcacttttcgttgcaaaagaaattatcttataaaatatatgtatatagcatatatctccaaagcaaatatgggacatctgtacctcaatgtaactgatagtaagttaaaaattatttgctgagttcttggtatgtggacagatgaatattataatgtttaaggcattccaccagcaggttttgaatttaaccaaaattttatgaagctaatcagaatggaattaaaagttgaaagactgccaggccaaaaagatcatctttcagaaaagtaaataattgctctatacttacatatttattatttatttgttcaccatccgtttatttttagttgagttctgtatacattggtgagcaaagggggactcattagcttgggcactcctaagggcaaacccaataacagatagtgaatgggaaggaaaatgagagaattagcatttagtgaacaaaatcttataaactatgctgaatggtatacatgctctttcagtaaagccactcagtactattacttccctaccttctgaatgtttaccaagttcgataaaatcttgctacatacaaatgggaagtatgtaacaagagatactagtggtttctgggtttaattaagttacatagaacattaagaagtatgttgggaaggcattagcttaaaagctgtcttttgccactgaggccatattcatcacccagattccctccacagtggagcactgctcagtcactgccttcagaatgcaaataggtcttcacaggatgctattaaaacccatagcaccgtatggttttacgctctgctttcttccagcaaacctacgtattttaatgttaatatatatgttcattttatctttgagaatgaaaatgtattatgaaaatataaatatttagtttttgtagacaaatagcacatttaaagatccagtagttattcacctgcctggtatgactgatagagaacagatgggtagcaaagaatcctcaccctggaaacatgtacgcatacacacgcaaacacaatctcgcataagctttaaggggttcattcattttgtgaaggttgaccatggataccagtttaaagatgccaggtgatgtttggcttttaagtatcatcaccttgagtttccttatataaatgttttaatatcaacaaaaaactcagaatttctaataggtcataacactgcctaggtatgggaagaggagagggtaaaattaaaagaaatgcaaatgtacttttctttgaataggctaaccagttagaggatgtatgaagcaggaccaccatagtccaagtatgaatatgcaaaattaaagcagattgctgtaaatctctcttaaaaagtcaagaatatgtcacagttggcatttttcggatgatcagaccgtttgacaaatctctgcaagggtccgagttagtcgaacatatcttttgcttatgatttcagcaacactgtgcgctttgccttctgggttgtattactaattctgttcatcattaagtgtacacatgtttcactgtttgactaaacaaagcttgaagacatacaagtccaaacattttctgtcctttctgtattcccaggtcagaagatcttagctctttatccattctgtgctagagtttgtctgaaagcatgaatcatggggttgtgttgggtgctaaatttcagttctatatgctgccttcactaatttatgactgtggtctgaacaaccaaaataaattatttctgagaactagcaaaataccctggaaaaaatttatgaaacctaccagatttgtaaaaaggtcagccaggcgtggtggctcatgcctgtaatcccagcactttgggaggccaaggcgggtggatcacctgaggtcgggagttcaagaccagccggaccaacatggagaaaccctgtctctactaaaaatacaaaattagctgggcatggtggcgcatgcctgtaatcccagctactcgggaggctgaggcaggagaatcgcttgaacccgggttgcagtgaggggagatcaccccattgtactccagcctgtataacaagagtgaaactccgtctcagaaaaaaaaaaaaaaaaaagaaaagaaaaaaggtcactaagtgatgagagaattaaaaccactcctattttctaccttttataacataaactcttgtctttacttcccaggtttgccatctttataacctgtaactaggagcaagtgatttaataaagggattcctcctattccgtctgcaaattggagttaatttttctcctctttctgcaatttctgttgttttagcttttgttagccataattagaaaatcaaaaggattcattgaaagttgagacaaaattgtgaagtaggaagatgtcttcctccgtaagaggagaaagattgttagaggaagtacatggaggctttggtgacacatccctatgaggaagtgatctgcttccacgggaaggagagaacagatgatagatgactcctagatgctcctgcgtcatgttcagtacaaaatcagagccgcatcagcaaaccggataccctgggaaggaacattgggataactccttggccataaacaaaagttttgctctggccttatgaactaagtggattaatagagattagttgttcaatatccttccatctaatggatccatattgttaaaacttaagaaacaccaaagggggagagtgtgagaatctactgccattttctccattgcttcattcaagacttctgtgtccaccttggcatgggattatcatttgcccttttatactcaccttaaactacaaagatcatttgtttgcctttctgaagaaaggaaggtggataaattttgcaggagactttaaaaattcagctcaactcctggcattaaagacaataaaggtggtgattcagaggtccccatggcagtttccccaaatattacgtttaactaagatcatctcaagcacagagagacttaactctctaaagtgtgatttttaaacctgcacacggaaattttctacattttatatgctcaagatttcttgaaatccagggtgtaaaactgtgaaaataatagttctgaacctatttatgaaagcaggagagaattgctttgttcagttttggaaaccaccagggtgcaatttaatgctccaggagagggttttctgtgacctggaaaggttggggtgattcccgtacagtgagtcatttacttccttcttggcaggattatgcccagggcttttaaacgctcttgacacttcactgccttccataagaaacgggtttagggcacaagtgtctattatgataagatgccagatttctagatcaagcataaagctgtggagtgggacaataggacttaataattttaatacacttcccacgtgaactgtcaagtaataagctacatattcagacgtgactggcattgagtcatcctgccattagtcaaatgtatgagacttttcccaagtcccagcaacaccaaatttgagaaatcgtataaaagaaaaatgaaaaagtaaatacgtctaagaaatggggaaatcaataaaaaatgtactagcaccaggggcggtggctcacgcctgtaatcccagcactttgggaggccgaggcaggtggatcacctgaggtcaggagtttgagaccagcctatccaacatagtgaaacccttctctactaaaaatacaaaaattaggtcggtgtgagggtgcacgcctgtaatcccagctgaactcaagaggctggggcaagagaattgcttgaacccaggaggtggaggttgcagtgagttgaggtggaggtgcaccactgcactccagcctgggcgacagagtgagactccatctccaaaaccgtgttagcttttatcaggaaaggccattaaattttcttcaatattacctacatcaatttgacatcaaactataagaacacaatatgtgagatgttttgaaattaatgaaatgaatcttctctttgagacgagtttgtgcacgctatgaagtccattaaatattttctgggaagagttcccagttaaaactactttctaaagtacccaagcacactatatagatacatcaagtaggtttattaatgtcagtatttcggtgaaaattgggaaggccactattctgagtagagaggtgtttgttttctacttgaagactatgaaggatattctgcactactgggcctatttctgaaattgtatctagctgcaagttactcattaatttaattaacaaatatttattagcaaccaaattgtggcaggaactgtgcctagaggtagaaatacattacgctcttgtttccagagaggaaaatgagtaatgttctaaaatgtaaatcttatgtttctctttcctcttgctgtaaatgatgtctaagccatttcggtggtgcctgttcttaatcctttaataaattattttgaatgattttttaaaaggcagtgtgattgtgaggtgagtttagtacaaattaaaaaatgtcacatcagttgcaaacagacagcacataattatgagctaaacactgtttcagaaacagtagtgacaataaataggattcggtataattagtcctcctgggacagatctcttcctctgttctttgccatatattttaataatgagattagccatctaatgccaatataaccagactgtagtattaatacacagaaaaattattgctagtaacagaagatttaaagacatgagggtgatccggattatatgcctgcaggttaaaaaaaaaaaatgtttcttaaactctctttatcaatatccttttcgtgagccactgaattcttttgtttttctgatcatatgaataacccgtcttaagtatgaatattgtgacaatagtaatagcaattactttaagagaatatgtttctatagagataacagaggggtttttccctaccattcctgtatgaaggtttctgtgtttttaattaaaattttaagaaattcatctttgtcttagcataataaaataaacctcactagacaatcaggacaccttgttattcttagatacattattatagctcaagaaataacaaatgttaagcctggaggatttgtattttggccaaaagttgtgagggcaattatttatttatttgagtgaaatatgcaggaatcatatatcaaaaggagggaggtcttttttttaacctcaacaaaaatataaaagtatagggaactgttatctatgtgaacccagcaaatctgagacaggtctcagttaatttagaaagtttattttgccctggttgaggatgcacctgtgacacggcctcaggaagtcctgatgacatgtgcccaaagtggttggggcacagcttagtgttatgcatttttagggagacatgaggcatcagtcaatacatataagaagtacattggtttggtctggaaaggcgagacagcttgaaacaaaaagcaggaagactcgaagtggggaggggccttctaggtcagagataggtgagatgaacagttgcattcttttgagtttctgattagcctctccagggtagacaatcagggtgattggctctaagcagttcccagctagacttttccctttagcttagtgatttgggggccccaagaattattttctttttacacctgtgttttttctttcttaactaaaaatagtatttgtttctgagggatagagataactaccattttatttggtatgatttatttgcctaccgtccaacaaagaaggtaatctgattttgttttcatttccaagcatgattcctagagatgtgtttaggtggccaaatcaatgaagcagaaccctgcaaattcatttattgggagatatcctaaggtcttcctgaattatctgatgttcccaggctttgcttatccaataggcattaggaagaaaaggcttgtgtttatgtagatgcacacaaaatgcgcatctcagcttacataaacagtgaaggggtttcccaggtctcattatccctggaggagctgaggcctggggagtcctcagagcctcctttgctactctgttattgtggcaggccaaatctcactaatgcaggcctccgtaacagctgtttccgtactgactgagtggttcagttaaatactaaaagctaaaaaaaagccagcgcccttatacagaggctggaatgtaacaaaagcccaccaagagttttgcctaggcctttcctggcaaaaccaaggaattcttaacaggacccatttaggattaacaagttttactgggagtctgaagaaactctacaggcctccaagaacaagtttactggaggtctgcaggaactcctcaaacctccctgatttagcaggagacaagataagagtaatcaccccagcacctagacccatttagattaagtaaatttactgagactccagaggaaggtcttcaggactcagaccttagttatggattaaagaagttaatcacttctgtcatgagatgaatgcacacttacacgtagacatacagcttagaaggcatataagttctggaaactttgtaattttgagttggtctggcactaatttccaggccatctccctgtaaaaggttacaaaaataaaaactctcttcctcccagttcatctgcatctcgttattgggctgtgaggtatagtagcccaaccctcagttcagtccgggaacattattatcaaactctggggattttcaggataagttaggaatatattttgaaggagaatggcagtattaaatgagatcagcaattgaaaacatgtgaatacattcaccatttaattacccatctcaatagaagataaggatgaatttagcactagaaaccatgaatgtcacaaaagcctaactttaataccttgaatcactttccagtaatcctaatcctttatccacatggatagaggacattcctatcttgctctttcttctccccacacattagcttaataattagctaaataatttcatgcattagctaaggaataatggaactccagaaacctaggacagtaattgagagactgaacaagctaaatctgaaccttctgcacaattaaaggagctgatgttagcatggcccacagaatattacctgcacttgtaaaaactagaaagtcaggcaagtactcctggaacagactgtcttttctaaccatgcacttatttctttgtttttaactttgtttttgtttgtttgtttttgagacggagtctcgtcctgtcgcccaggctgtagtgcagtggtggaatctcaggtcactgcaagctccgcctcccaggttcaaacaattctcctgcctcagcctcccgagtagctgggactacaggcgcccaccaccatgccttgctaatttttgtatttttagtagagatggggtttcaccatgttggccaggctggtctggaactcctgacctcgtgacctgcccgcctcggcctcccaaagtgctgggattacaggcgtgagccacggcgcctggcctgtttttaacttcgtaagttgctttgtagaactatcttaaacttggtctattttagattctccttgaagggccagatcacaaagtgattaggagaaggaggctctggagccaagacagtgagactaacccattcttcaaatctaacactaactagctgtgtaaccattgggccagggatgtagcctatgtaaccacaatctcctttgtgcttcatgcctcaccaataaggtggggagagctgctatgactctgtcatagggctgagacgaagatttgatgagttaccagcaaaaagcatttaatatactgtctcattcagaagcagtcaatacacattgaactcttattacttagaggaaagaaaggggtcgatgatttatagataaggcctgagtgaaagaaataaatgtgtattgagtatcagcaatggactacgcatcattctgggtaactatcactgaacacatttaatctgcaaatactatctgaaagatactgccatctgaattgcataggtgggaaaagtcaaggcttttgtgcttatttttaaatgtatgttaacatgaataattaattggccgtgcactggtcgcacgcctgtaatcctagcactttgggaggccaaggcgggcagatcacgaggtcaggagatggagaccatcctggctaacatggcgaaaccccgtctctactaaaaatacaaaaaaattagctgagcatggtggcacgtgcctgtagtcccagctactcaggagactgaggcaggagaatcacttgaacccaggaggcggaggttgcagtgagccaagatcacgccactgcactccagcctgggagacagggcgagattccatctcaaagaataataataataataattagtgggaatatatgctgtttgttgtgataggagaagaaaaggggagatccagatgttggtcatcagaaatgacctgcatcttctctaaattgaaatttagcttgaagtagtaatgccaaggccagcctggggccatggcatcctggtgtacctgcttgttggtgacagtccttttaggacaaaatatcttacaaaaacattcatagatgactaactggaaaaaaagaagttatgatgaaaagcaattcttactgtttttgttttttgttttttgttttttttaattaaaagacaggcagttattctctttcccaggcttgagtacagtcgtgcaatcagggctcactacagcctcaacctcctgggttcaaataatcctcctgaccaagcttcccaagtagctggaactgcaggcatgtgtcactgcacctagctaatttttaaaattttcttgtagagacaggttcttgtaatgttgtccaggctggtctcaaactcttggctgcaagtgatcctcctgcctcagactcccaaagcaatccttacttttttaattgaagtgctttttttttttcttatttaaactcttaaaaattcatcccattttcttcaaaacaataaatcctttacaagggagaaaaatgaaatagagcaactaagaaagcatccatgaaggccaggaaggaacatcatggttaaatgcgattagtcacagccccttctgtctccagtcttggatgaataatggtaacagaactagagagatttctaagaccttggtgcttaataacaagcaagcatcgagggtggttgtgcaagatcctgatcacacaactctgcatatcaaatatccttcacaatcaacaagagtcagcctttaatctctgatgttttcaaatgttctttttttttaattcacatgtataacctatcctcttttcaatatatagagatatagcttatcagtcattacctcttttactacttttcttctgagatttaaaaggtcatcctctgatttgtaaattcaaccagatttcacagttcagatgagagttgtaataagttgccaagaactgttgcaagctgtgatggctgtctttctggggattatagagaagcacatttcttttaggaaaaaagaaggcagatgagcccaagttgttttatttttattgtgtatatgtatttgttttctcaagtacagtagcatggcctctgtggcaggcattcaccaagcaaatacagagcaccctctgggtcaagcactgtgttattggggttccaaataaagaaaaaagaccaaatccagccctgtggatctcacattaaagaggggagtaagaatcatagataatttaatgagttaggtacattaatggggatttgcacagtatttcataggagcacagaaaaagggtacctcgttccacctgagatggcagggagatggctcctaagttaactaagcaaaaggggaaggagaggcacatcccataggatatggataacacaacaaaagctccattaccacccgccccaccaccacacacaccatctctggaataaattttgtaccttccaactggttttcagggtactcatgacacatgggttaataatagctaggtttgcccaaatgaccaaaattctattcccaacatgaattttcacaactggtttttttgtttgtttgttttaatgaagaagaaatgttgtgtttttggaaatcatcttacaaaatcatgtagtggaatgcatatagtgatgaaattgttgaagaccagggaatctttgtccttagtttttattaggatggatgttttcaggtaaaactaaaataaaaatgaaatggaaccaattagaaagaaaataggagcacttaagacgaaatgtaattgttgctgaaagaattagaatctgatagcttagaaagaacttaattaaatttcagagtaaaataaatacagtttagcaatggcctttctcctagaaaaatataatgtctcttacagttcagttactccttggcttacaaaatagtggttaaatttcctgtttttctcattttgatttcgtatgttacatgttactggtgatgggattatctgtgtgacattacctctggtcttcaaaatgtacacgtagcaatgtagtctcacatatgccccttgggtgcgaaaagagaaggacctaacttaacctgacagacctcaaatctgttctctttctatagcagagtactcctatttaaaaagaaaatgttgagtaaggaggacagtcatcatatatgtcgagaatgttaaatgctcttgtggaagtgaaaagcagccgatctaagtaattacccattaagaaaggagtaggagaaatgtttagaaggcagacctgcaaaaaggtgactcacagtacgttcacatgaccggatgcattagtggaacctctaacccatcgccaatggaagaagcagtgttttgcacaaacttgaaaaagagtttttcattttcctcccacagcctcgtcacgtgttcaatatgctaaagaagtatgtccgcgcagaacagaaggacagacagcacaccctaaagcatttcgagcatgtgcgcatggtggatcccaagaaagccgctcagatccggtcccaggtaagcgtggggtataatcatcttctgcagctttgacaatccaggattcttgcttcttgggttggtgacaggatcccacgcattctccgagcacctataggtgttttccctatggcaagagctctttaacttctggtaaattctaaaagcttgtcttagagcaatatgtggtttggcattttctgagttatgaaaataacaaatgtaaaaatcttagtctactgctaactgattgctaaggaactgattaaaaccaatgactaaaatgagaaaaacaaaagttgtataaactaaaatcttgaaaactggttcaactgaagtatggcaggcaatcataaacctactggaatgttgagatttcatgtgagcctaaatgaagcccagtaataatgtattttatactccccggttcccaaaggctgaaaactgggatctaccttaggaaatgtgaaattttacattttcttgaatgaaagagttaaatatatatagcatgaaatagccaatcaaattgaaatacgttgttttctagggggaaatttgcaaagaaatgtatttaggcatgagggtcctgttaagagagcctcagtattaggaatcagaggtggcagaggtagcctttttaattggctgttataagcatacaagataatggtaagtttcaagatcaagtcttaaacctgagctcaaaaagttagagaacagaaataggagaacaagaaaaataaagttgccctttcagttcaacctttttaacagtagcagtgttttgtcagttttcttttggaagtttgtatctacctgcagtgcttggtaagaaaaataacctgggcgacagagcgagactccgtctcaaaaaaaaaagaaaaaaagaaagaaaaagaaccattcctacccccagacattgttgacctggagttgtcatcctttgatgcaggttatgacacacctccgtgtgatttatgagcgcatgaatcagtctctctccctgctctacaacgtgcctgcagtggccgaggagattcaggatgaagttggtaagtaagctgttcttttgatgctgcacatggacatgtattttcccccagaggaaaattgaggaagtgagttatctgtttgaggaatatggaagttaatagaacagcttgccttttacgatgaaactgtcaggctggaactagcttactagccttagcaattgaatcagttcttacctctccatacttgtaagactggaggaatgtcgcctgacttagggtatagttttgtaataattggacacttgttattgaattatacgtggcagcattttttctaatttgcccaatcttgttatggctctcaaattatgatgctttggtactttacaattaatggggaaaaaaactcattcttcatcttttgagtgtcacgattgttccatcttacaaatgaaaaagctcaaacttaaaatttgagtaacttactggcctgtgtcacatgcattataagtagcacagccaaaacacataactgtgacttgtgactttgaggttattgttatattcagtaagtcacaattctctttgatggctgagcagggaagccatgagtgttctctgaaccacatcattgtttaaacttaaaagatagtgggctattaaacttatattctgaaataattgtactctcacaagaacttggaaaaatagtacagagaggtctcatgcatccatcacccacatgcctcaccagtgacatcttacgtaactatagtccattatcaaaaccaggaaactgaccttgtgtgcccactgtcttttatgtccctagttttcctaatgactaatgatttcatttaagatctctcatttctgtttctcttggaaagagaataaaataccacatgagtctctgtcagctgccaaaatgcccataactgtttaacttacttcacaaaggtacatagatgacgattatgttggtgcatctttcaatataagcatatgtacctatactggagatttagtgtgtagtctaccaacatataagcaatatgtatctggcatatccttccccataaagaatcctaccctttgttaattgggttggaaatagatacaggttatcatctggaatcagagcacccaggatgttgtagatggatgtacccattacagtaagtccgactttgaagtgcctgaaacaccgctcaagggaacagctggccctcactttttcccattttatgccagtgttattctgctcattctttcctgatttatgtggccttgtaaatattgtttgtattgctgtgaaatatttggcatgtgtcaagtgatgatgttctgttcagtactgcacattaatggacggaatctgaaattatactttgagctacataacttgcagaagaaacttcatatgtcagggaggtgcagtgtcccagaactttgggaggccaaggtgagcagatcacctgaggccaggagttcgaaaccagcctggccaacatggtgaaaccccctctctaatttaaaaaagaagagaaaaaaagcaacttcatagtgtgccaagcttttgttcagaaggagcaactcagtgttgagcaagaatttatgaagatagtggaggtggagtttttagtctacaccatgaattgagaacagagatctccaattaatttttcactgtatcaagtttctttagcaaacaaatatacttttcaggtatacttggagaatagacatcagtaaggaacctttaaaatactatgtattaaataagtgtaaagaagttctccaaaaagttgtagaaggtacaaaatgaaataatttatcagtcttaatgaactgaagctaaaatcttctagaaaacatggtttgtttgtttgtttgtttgttttttacagctatcttaagcctgttttcacatgtgacttcagttgaagtggcataggtaataactatagggaaataagccattacaaaggactaaaaagttgatgaccaatattccaccctcacccagcaattattgttgactctttataattaaattattagaactttttatttggcactatactactgaaaacattagccactaattagtcacacttccacagaacagatggtggttcagatatcttgaatattacgaaatgcccaagaatagggcagcacaataaacttcaaatctcagtaccagggaggatatttagataactagtatcatggaatctttttctgtaaaaagaaaaaaaaaaacagccattaggttggattaagaacatattagggggtgcagcacaccaacatggcacatgtatacatatgtaacagacctgcacgttgtgcacatgtaccctcaaacttaaagtataataaaaataaagaacatattacgtatgtgctcttaatgtgtgtgtgtgtgtgtgtgtgtgtgtgtgtgtgtatgtatgtaatatgctctcaatccacccattagttgggtttttttaagtaatgacatatatatcattctaaatataccagatgccacattctgaaagataatcttttttaaaaacctttcatttggaatcctgggtgcttccatttttaaatgactgttctctatagaaagagaagtttgcaataacgaaccctgtacactatctgagctgctagtgtcaaagctacagaagtggtttgctggggagaatagcttttctgggttgaacctagttgtcatctatagtcctttttcatttgaaggaacatttaaaacaatacgtccctttttagtaggaatatagttgaaacttcaagattggccaggggtgctaattgcttaagccaaatgttattagaggttcctcatgttattctttttacttttgtatgtgtttaaaatttctcataataaaaagtgttgcttttagcttactttctaaataggttcttcatagattttttttccaggttatgtcttgtagtcgttctaatattctctgattaaatgctttgtcattagtctgagttgcatttatttgctatttctgtatataatcaaattttagatttggagtcagttcagtacaaatagcatactaaaattcagagacactggcaaaaggagaaaattttaaagtccctaaaaatgcatgccttttgtatagaagtttgtgcttataaatacaagcaattaggatgtgcttaatgcagtcaaacatctgtagagagatacaatggtttaattaaataatggtaacagttgctttatggataagaggttttcaccagtctggggaactgccagtatctttagtgggagaggtatatctgcttcagtaaattatgcttccaattagaattctcttttatgggtgaaaatgaggaagaatggagtcatgctgagaagaaggaatgctatcggtgaaggggaaaattgacattaaatttgtgagcagtaaactgtgaccagagcatagggttcatcatgcttgtgagttctggccctggccttgtatcttccattgtgcttccctgaggcatcctgtctgttcatgctactttcccactaacttcagtgaatcccaaattcatgggtctagccacagccagcgtactgaatcccagtgccatattccagaccccaaatatcccatgtgcctctgaacctgcaatcaatgtgtataacactcatgtccttctggaaatttacttgttttacacactctattctgagttctcttggttggcctaaactatccatgatgccttcctctccctcacccattatttcttattagttgcaagttctgtatatttggccttctgtgttcatgtgaaatctctgcacatcccctacttacctgagatcctgtcctctcatcagtgtcattagactcccagccagtcaccctacctcttatctcacattggccccctcccacttcaattcctccttttcggaactatgcaagttcccttaaaaacaaaagacaaaacaaaaaaaacagctgcaggccggcggcagtggatcacctgaggtcaggagttcaagaccagcgtggccaacatggtgaaaccccatctctactaaaaatagaaagattagccaggcatggtggcaggcacctgtaattcccagttactcaggaggctgaggcaggagaatcacttgaactcgggaggcagaggttgcagtgagccaagattgcactattgcactccagcctgggcgtcaagagcaaaactccgtctccaaaaaaaaaaaaaaagaaaaaaaaaaagctgcttgtggtttttccttgcttgaaaagttgcacctttcaagattcaagtaaaatgcccaagtcctataaaccctttctaatttgcatagagaacggagaaaagagctggcatttgagtgacaaccatgtaaccaactaatgagtgcctctttgtgataatgctgatggtcacattctttctttatgaatgttccccgttgaggtacaggaccgccatatagagatgtggcagtggcaggtggtttagggtaagagtggagactgataattttattctacatcccactcaaggagccaagccctctggcattgtgcacacccactggaagtgggctgttcttgcatttcacacaaaggcagcatatgggctagtgaagatactcggaaattcagtgatagcatccccagtttacagttgaagaaattgaactttgaacctaagagagtttgccaacttgcccagcccagatagtaaagtgatgaaagtggggtggaagccaagacctgccagaagtccaaaatctgtgttctttctgctgcctattttcctctctgaagtggaattttcccctacttaacctcaatgtgaaagcactgggtatccacctccaataccatactctaacttggagtaaattatttgtttatatctctactaaccctccatcctgtgaactcttccagatatatgttggtcatccttgcctcctcaagatccagcaaggaccctggtactttttagatattagtaattataaatataaggttgaagccagtccccaggataaaaaggcagatgctccttaacttggactgatgaagtgggctcctccgtaaccctaaagacctgaccaaaactccttccttgacatctagcgtaagcaccacacaaaacaaatttctttcctaggccacagcatcctctaaagctgtgattgatcaagctaactaaatggatgtggttggccaagataacaaagcataaatcagggttctgaggacctttattaataaaattttacaacatggtccttctttgtaccatgaccctctgctatttggtcatctacttgatttaattgtgctgtcctgtttgaccgccaaccacagtctgaagctattcccatgacaaataagtgtgaattttcaagtgtcctgttgtgttataaaaggcccgtgttttattttataatttcatatttttttcattcaattttaattattatgtgcaagttcccaggctcagtcatttattaatgtttttattttttaaaaagttattttcaggcagattatgaagatttcttgcaaagaatggcctcaggcattgtttgtatagagataaaatctcctcttttaaatcactatgtaggtcttcattaatattttttcattcaacaaacgatggaatcattatttcagtgaaactatggctcctcttcagtgttcatattctgctttaattatttattaatccttcaaaagggcagaatcccttcatcctttcaacctttgctttgtcaaattgttacttaaaaatgattggtgttttctttgtcctttgtaatcttccttaaatctctgctaaaaggattctattctactctttgtattggcactgaggttatttatcaaagtgtgcttctctttgcagctacctcaaggctaaaaatgtagctcttttcagagatggctgttttacagaatgctataataaccaatttatgagaaaggcagtaggaaataaagagggaacaaaggcataattgtttcatacccattttttttcttctagcattcaaaattaataaaaacatgaattattataaaccagatgcgggaaagatctctggctgaataaatccatagtgaatggggcaggattgaaagatatggcggggaatcaagaaattcgcaataatgaaaggatgcttattttttattacaattttactgtggcctcttgataaaatgttccactcttcaggaaaaatgcagcatggttatttcaaagacagtgtttccatattctgtttctaataagcctgttgatttgggggtttagtgggtccaaagtagactaggtttaaaatagaatatttatagcacttcccagcccaacaaaatagaaatttaatgttattgagaatttcaagtatccttatgtgtaattgttagtcaaggatgaacatcaaaaaaaaaaaatcataacagcaaatagagagctgtcactttgttcttataagaacataggtgtgactttgtttttcataagaaatgacttttaaatgtatatagatttaatggtttacagctgacttaagtatttggacataagaactttttttttttttttttttttgagatggagtcttgctcagtcacccaggctggagtgcagtggcgtgatctcggctcactgcaacctccgcctcccgggttcaagtgattctcctgcctcagcctcccaagtagctgagactacagacgtgtgccaccacacctggctaatttttttgtatttttagtagagacagggtttcaccatgttggccaagctggtctcgaactcctgatctcaggtggtctgcccatcttggccccccaaaatgctgggaatacaggcgtgagcccccacatctggccaagaacatttatacatattatcaacaaccaaagccttgttcccccattggtttcataatagtctcagagctccttattcatattttccctagtgttattaagtaacagacatgaggcctgtaagtttagctgcctgtgtctaaatgtatatctttgacccaagacaatttctctttcaaaatagaaccactcatttataaatgaaaatgctttgtcaaatgaatggcaaagtacggtatactattaagacagcctcctagttttctgacatttggactgccatgttgaaatgtctccacacagcaagatacaaatgtgtgaatgccagtacacttcataccttaggtccccaactggtctgtctgcagacttgaggttacagacctgcaggtgtcgaactcaccccatagtggtggttagtagagtgctttgtatacgtttagctctctatgccttttttggttgtgatattaggtaagctctctttttcttgctttggagcttaattatggaatctgtaaatatagtgcatatgtcatccagatgatctgtggaagtcattgataatgacctttaaaaattcacatgtaatacagcatccgttttcctgaatgatttttatagttttaccattggcaaacagatactttcttttatgtatttctactccataattttaggaaaaagtaaatccttttagctacattaaaaagaatacactttctaggaataatgaatgtaaaaaaagtttccttttttaaaaaaatattgcgctctctaccattctggcagacaaattgttgaccttaatatgtataattcagtgcagtatattgatcttgtttattgtgctccaaatggacgctggcagaaatttgaggaattaaatatcaaccacagtgttttcttcatgcgattgcaatggtttgttatggattattttgttcagttcaaataaatgatgtacgttcagattctttgcccaattttttaattgggttgtttaccttactttcttaattttatttttatttttatttttatttttatttttggagacagagtcccgctctgtcacccgggctgaagtgaagcggcatgatctcagttcactgcaacctccgccttacggattcaagcgattctcgtgcctcagcctccccagtagttgggattacaggcacatgccaccacatccagctaatttttgtatttttagtagagacagggttttaccatgtttcccaggctggtctcaaactcctgagctcaggcaacctgcccacctcggccttccaaagtgctaggattacaggcgtgagccactgcactcggcctgctgttattattgagttgtaagaatttttatatattctggatactattaaattcttatcaaatacattatttggaaatattttacccattctgtaggttgtattttcacttccttaataggatccttttgacacacaaaaattttcaatttagaagtctattttatcagttttttcttttgtggcagttactatggtatggtatctaggaaaccattgtccgaaacaaggttacaacgatttatacctgttaccttctaagagttttgtagttttagctcttacagttaaatctttgattcattttaattttcatatatggtgtgaggtagaggtttgactttattcttttgcatataaatatccagtgtcccagcaccatttgttgaaaaagactattcttgccaggtgcagtggctcatgcctgtaattccagcattttgggaggccaaggtgggcagatgacttgagcccagaagttcaagaccagaatgggaaacatggcaagaccacatttctacaaaaaaattatccaggcatgataacatctatttgtagtcccagctactcaggaggctgtggtgggaggatctcctgagcctggggtggctgaggctgcagtgagccttgatcacgccacctgggcaatagagcaagaccctgtctcaaaaaaaggaagaaaaagactattatttcccccattgaatggtcttggcactattacacaaaatcaattgtccatagataatatgggtttatttcttaattcttagttcttttctttgatctgtgtgcctgtgcttactgtagtaccacactgttttgattattgtagctttgtagtaaattttgaaatcagcaagtgtgagtccgttatctttgttcttctttttcaatattactttgagtatccggagtctcttgcattacaacatgaattttaagatcttcctcaccccctgcccccactaccatttctgcaaaaaaaaaaaaaaaaaaaaaagtgcggattgcattggatctgtagatcattttggggaatatttatatataatgttaatgaggttttaaacaacacttttatctactagaactgatatttgcctcgaaatgattccaccttgagccccattcaggaacgttagtattttagaagtagcaagagaactgatttagcatgctatcatcttttactccaaattttggtgagattccagagaaattatttgtgagcttttccttaagccatgatgactgacatgtcagtagtttttgtctgtttttatgccattcttttatttttgtgcatgtgtgggcacctcaaccaaatggatggagcctgaggcatggtctcccacgccaaagtctgccgtttcttttgatgatccaatgcagttccaaagctattttctcaactcaccagctcgtttgtatggccctgtaatttgaaacaaaatctaaaaagaaatccaaattaaaatgattgggaagtgaagtcagaccacagtggtggctgtggaactacttcctggcatggaacactagagcagatgtgtcctgctttttttgtagagtcttgggaacaaccaatgattttagactggaacaagggctggttattctgtttttcacaagcatctgccttcaaggttcattttttaaaagaggaggggaaaaaaatcagtgatgtttgccaccctgagtatggagatgaatccaaattgagattaattttgaaatatgtttcccgaattttgagattaattttgaaatatgtttccacaaacactaactgggaatgacatgagtttgtttcatgtgagacggagtttggaagacatgttaatttgcttgttggtgttcaactcagaaacaaattttgcatgtattttctgagtaagtgccattattagttaacagttttcctgccgtatgcactatgggctgctttagaaagtaaatcatagaaggttagttataatatctcatcaaaaatagtggatccatctattaaccggttccaagttatgagacgtgtccaaaggaatgttgacttggtgtgcacctaaacactatttgtgaagaggctttggacttcgagcatgaaacggggtcagagggtcaaggccagggcgttacttaatttcagctcctgttgatggattcattgacttcagatagtgcgtttaaaaaagcctgtttaatgtgtttgtcttttgataattattatgtatttacatatgctcctaaaagcatgagttaaatcttatttctttgaaacagtgcttggcaacaacttgtattgtcttgtacatgccttttgtgtctttgcttttggttgggggggggcattgaaatttgtctgcccatcccctgagggcagatactgaggtgtggacctatgtcttcagcttcctgtatagcattgaagttgctatagctgcatgttctctaaaatttttatacatgcgatttaattgttaaagcttatgatttttaagtatagtattctgatagcaaatagattttgtcaaataaaaactaactttatcatcaccactgagatatcactaggtatatggcttagttctcagtcaccacttttatttgtaaggaagtcttagaagttttcacaagtgtatatgtgatagactgggcacagtggctcacgcctgtaatcccagcactttgggaggccgagtcaggcaggagttcgagaccagcctggccaacatggcaaaaccctgtctctactaaaaataaaaaaattagccgggcatggtggcacatgcctgtaatcccagctactcgggaggctgaggttggagaattgaacctaggaggcagaggctgtagtgagctgagatcctgccacttcaccctagccagggcaacagaacgagactccatctcaaaagagaaaaaaaaaaaaaagctgggtgcggtgctcacgcctgtaatcccagcactttgggaggccgaggtgggcagatcacctgaggtcaggagttcgagatcagcctcaacatggagaaaccccgtctctactaaaaatacaaaattatccaggcgtggtggtgcatgcctgtaatcccagctacttaggaggctgaggcaggagaattgcttgaacctgggaggcagaggttgtggtgagctgagatcgcgccattgcagtccagcctgggcaacaagagcgaaactccatctcaaaaaaaaagaagtatatatatgatgcttgctttagcagcacatatactaaaattagaatgattaaagagattaacctggcccctgcacaaggatgacatgcaaattttgtaaagtgttttatatggaactttacttacatgaggtacctagggtagtaaattcatagatacagaaagtagaatgctgattgccaggggctgagaggatgagggactgtggagttagtgtttaaagggcacagaggttcaatttggcaatattgaaaatagttcagtggggaagatggatggccgtgatgcatcgtccatcacattgcacagcatcgtgaaatatacttaataccctgagcgttacacttaaaatggttaaaacagtaagatttatgttatatatatttaccatgataggatatatatatgtatattcatatcattcgccattgtgaatagcaaggagattgaagaaataaggacacaggatcttcaataaatatgtattaaatgcttcccatgttccacattctttgtcattgccagacacgtcacaggtataagggcccaatctttgttactcaaataatttagaataatttagaatttgcttggggagactttggataaacagttaagaagctgtatccattaggtaaagggacattgcttgctgcgtctcgtagcatttggtagtctcgttagacagccgttcttactcctatcgtttgctgaaatttattagcaaaggaaagaatcttagttttcagctcgttcagccgcatgatttcataggctcaggaaaaccatgtaatatgcccaaggtcagacgtgatgaataagactaaagactgaatctattccagtgtctctgtgtccagtgatacttacttactgctgttgccaagttaaacaaaactgggtttgcagagctgtttattcaccttcagcatcttttcattgaaaatgcggtagatagaagaaatgtccctcttttagcatttgtacctcagtaataagatgcttcccaagctcaaagactccacacccttaaatatgtaagtcagtgttaagatatttaaagagaacatgaatatcagctacattgtgcatgttgcaggatttttatattattttgtatcttctgcttagaagtcataagccagcccatgaaccatgccaacaaacataccttcttccatgtgattattgcagccagatttttcagtgcaggacaagcaaagttttctctgaaagcatgagataataattctcagccaggtcttcgccatttgcaagggatcagacataagagtttttagctctgttgatgttaatagctagagcccctgttagcagatggcatgttagtggcctgttgctgctggctattaaatcatacacattggccaggcacggtcggtcacaccagtaatcccagcactttgggaggctgaggcgcacagatcacaaggtcaggagtttgagagcagcctgaccaacatggtgaaaccccatctctactaaaaataaaaaactaggcaggcatggcggcacatgcctataatcccagctactcaggaggctgaagcaggagaatcacttgagcccgggaggcgaaggttgcagtgagccgagatcacgccactgcactccagcctgggcgacagagcgagactccgtctcaaaaataaataaataaaaatattaaaagtaaatgatacacatcatgagatcatctcccaaggcagcagagaattttgcgtatttttttcttagtttatattgttgcaacagagtaattcttcttgatcacagactttgctttttttgttgttattgtttctaagtttcacttgatcctcaaaataacctgagacagacaaaacagataggttttcccattaatctccttcatgagtctgactttgccagccaggctgatcttatatccatagccctggatgcatttatttatgttattccatctgcctataatgcccatccccaatcttggcctattacatgtgtctaacattactttgatgtgtacatgtcagtgaattaccacttaactgattgttagctttttgagagtatgtatcaaatctcatgtgcatttgtgtgtcctgaaacaaattattaggtataaagtatgtattgcaaataccatgcccagggaatatttcagagctgtggttctccaagtgtggtccttagtctagcaacatcagcatcgcctggcatcacctgggaacttgttggaaaagcacattccatgatcccacccctgacctcctgaatcagcaaagctagggatggggctgagcaatctgtattttatcaagctgtccaggtgacattgataaatgctaaactttgcgaattactgatttagagactaatcaactcattaaaaagttaataaataggtgagaatccattgtagcaccccagtcacctatgctattatcttctaaattcacattatacaaattgtatgccacaaaaatgtttaaggtgaaaacccaaaggaattgatgcattggattaattcacaaaaatttaacagctgcaattcatagaaaaaaaatgcatgcatatctgataattagttgtagattaaaaggtgaacaacttcttattattaataccaatgaaaatgtaattttttaaaaattatggccaattggtagttttttaaaaatctgttatgccttgtcatgataaggataggtgaaaaggaactttcataaactattgctaagtatatgggtgaaaccttttagactatttgggtctacctaataaattaaaatgttcagtcttttctaattttagcaccgtatttctacagatacactggcatatctgtggagaggggcacttctgcttgtcacctgatatcccttactactactaatatttttataagcattattacctttaaaatcatgttaaagggtaaatgatgtgcaacagactcagtttccccttctctgactcctgtttagtttacatctcttttctctctctcatttgggggctcaatacccttaagattatagagaaattgcagtaggtaatgttggctggaaatgctaacttgtaagaaacttgggtggaaatggtttaagccatcagcctaaacgatcagtgaaaatgtcagacattctccgctttcttcttccaagatactatactctactgtggccttagagttcttaattcctatataattctgattaaaaaggaaggagatgctcctaatataccttgctgttgtcccctcctgttcattagggtagctgatgtcagtcaaaataaagtctagaaattcttgagtactttttttttttgtaatatactgagaatgcttgaagcaaactaaccaaatttaagtgttttaaggatattaacagtaacaggagagcccctcgattttctgctaagaatcaacctgaacagtttccagactgctggttggcaatgtcagtatcatgagaaaaactgaaaaaataagaaactttagagaaaaagaggaatcagtgcaggctaggggaatgaacttggtaatccagtagtctttccctgccagcattttgattgataagctaagtgtctgctttttctcatcccttattttttggcaggaaaccagtattttgatacttgaatgccttctttctatcttaagggagaagccttcttaaacttcaagtgtgaagtagatcctttaggtataggatgaaaaattaagtgggactatttgtgaattactaaatcgcaaccattaaagaaactaatgccctaattagcctgtcttttgacagacatggcatccatatgtaagtctaatattgtatgcaaatgtgagacaggttttgctttctagatctctttgatgtgaaaggaaaagctggcttcctggcttccttcccatgttctgtatggacctgccttcatcctgctgccaacagctcctcaagggaacatgaaagtggaattaaaccctcctggttttcagattcagaatcctgggtgattaagtggcttgatcaaaatcagaaactgtgaaagtgctaaaaatggtcaaggcccaaggagttcctcatgtgtggtcaaaagcctttcagaaatcaaagtgtgtctttaaatacctggggtgcaaaaatcagatgttttttatttaaagaaaaataggtatattagagcagaactgggggccctctgtaggagcctgagtctgggtgtttactgtcgtctaaggccttgttaatgtgggcttgaggcttcggaatccacgaacaggggaagctagcgtctctcgctgactccagtcctagctcgagctttccatactgccctacgtgacttctgcacttttgtgccatcagccagtagactgagaaaagtatctggtatttgtcggtgtcttcggtttagctgctttaagtccttggatggaaaaggctgattgtcatcctgaaatcattgtctcctaatgtgtaattggggccaagtgaagcacagtaatttagaggaattctagttaaaaatacagattcttgggctctacctcagacctacagagatctgcatttttcttattcccccaggtgatcctttaaacattcagaggtttttaaaactcatgcttatatgcaataacaaaaatataaggattcttagaaacttgttatatttgtcttgaacatgggatgacagacattgtcattttcattgaaaaaaaaaatgaagcagagactcagaatgtatttagagacaactctaaatacattctggcagagcctaactactggattgcagagatcctccctgcttcccccagtccccatctataaactggccatgtgaatttctagtggtgttcacttccaaagtggtgattttataaaatattacaatgaagcattattaacctcaagaagttcagatgcatagagagtttatttgggtgtggcagcattagtggctaggttttatttatccaagataagacttcttattagctatgaaaagggattggcataaactgcttattaatgtccattaactgtatctaaagggaataaacagtataaaaggccaggcatggtggctcacacctgtaatcctagccctatgggaggctgaggcaggaggatcatttgagcccaggagtttaagaccagcctgggcaacatggggagaccctgtttctacaaaaagtcaaaaaaataataagctgggtttaggggtacacacctgtaatcccagctagtcaggaggctgtggttggaggatcacttgagcccaggagttggaggttgcagtgaggcctggcggcaccactacactccaggctgggtgacagagggacgaccttatctcaaaacaaacaaaaacaaaaaactgtataagcataagatgggcttgagtcacaaaattctgcctttcataactttcccccatttgctgtttgatttgctgtttcagaaattgtgaacctacttctctacttatagaacatttacctccctcttagattcttccctttctatcattgatactgacattctgcttaaagaattatccatttaggctctcttcaaatccaaagtgatattattttattttaataagagatgaaagggaaaattgacaaaatgtgcctggagttgtcagcattgtaaatgatggactgtaaaagcttcgtcttggaagattgtcagagagcctagtgccagctcaaaaagtgtggtctttttagagaattgacagaaatgttacaaagaaaacatgtgctgaataccaactccaggtgcgaatcctgagaagcaactcactctattctgcagtaggagatgaattttgcaggttatacagcagagcaatttaaactcccttgtttcttaaagtatatcctatagtgacttgggatggaagtcatatactatccccttttttgttccttcaaagtaaatacaccacagagctggagatgtcccagacacagggggaagctgtttggatttttcccactgcctgtaatgaagcaagatagggaggaagaacttgggaacttgcgtggcaaatggtcaagtaaagaaaaagaaaagctttttctttacttgaccatttgtcacatgtgctttcaaatcctgaactgagtcacatctgaaataaatcacttccttgtcatttccatgaaaggggcagtacaagaaattccttgcacatccctggtgagccccttgttactctcagattcagctattgccttcaggaaaaaaagaaaaagaagccgaagaaagaaagaaaacagaatcctctagaaaaagctattctgacctgtgctctttcttttgtctgagtgtgactagataaatgcattagtctgctagggctgccataacaaaataccaaaataccacagactgaatccttcaacaacagaaattatttttctcatgcttctggaggctggaagtccaagatcaaggtaccagcaggtcggtttctgaggaggcctctcttccttgatttacaaatggccacctacgcatcatgtcctcacatggtctttctcagagagaaagagaggtgtctcttcctcttcttcttttgttttgttgagacagagtttcgctcttgttgcccaggctggagtgcaatggcacgatcttggctcactgcaacctccacctcctgggttcaagcgattctcgtgcctcagcctcccgagtagctgagattacaggcatgcctggctaattttgtatttttagtagagacagggtttctccatgttggtcaggctggtctcgaactctcgacctcaggtgatccacctgccttgccctcccaaagttctgggattacaggcgtgagccccgcacccggcctcctccttttcttataaggacacctgtcctattggatcagagtcacacccccatgacctcatttaaccttaattatctctttaaaggtctgatctccaaaggtcccttgagggttagggctttgatacatgaattttcaggggcacacagttcgatccatagcagttggcttattcatactttgggtagatcctcttcatcgttcctcagctactgtctatttagtgcacagcttctttatcctaaagctagtcaggggaggcatggaaggtattatttctcctgtttctgcacctaaggcattaaaacgaggttgtggtctggcagcctaaactcggccttgatgaacttcaaatcctagacctccttggtatgtgaagtgcatacacttgtatggagggatttgacaggttttttttttttttttttttttgagacagagtctcactctgttgcccaggctggaatgcagtggcacgatctcggctcactacagcctccgcctcccggtttcaaatgattctcctgcctcagcctcctgagtagctgggattataggcgcgcaccaccacacccagctaatttttgtatttttagtagagacggggtttcagtatgttgatcgggctggtctcgaattcctgaccttgtaatccactcgcctcggcctcgcaaagtgttgggattacaggtgtgagccaccgcgcccagcccagatttttttaaattagtttttagtgtatccacactgttaaagcaggtggatactgctggatagtataacaaagtatagtgtgacaaacccataaccaagcattgttagctatattttctcatgtcttgagccaaaaggtcacagttaacctaatgttgctactaaacactcataccataaaacattctattccagtcttccagattttacacaagaataaaatgaaaacttttagactactggagatttttttttaaatacacaatttgttgaatgtgaacgctaaattgaaattgacatgctaagttttatagattacttcagctgccctgacttcagtaaatttagttgtgacacaggtacaacagctgacttctttctggcattagaggtggtgatgtttcgtcactctggagttagtaaaacctgaaacccgccaggcatttgacacacagtttgctgccagggacagctcagcttctggcttattggagaggaaatgacctaacctctgtgtttacaaagtgtttgaaactgaggcccttccacttccttgctgagtgtaagggttgacctggcatccaaaatccccatgatcttctcaggataagtcatgcagccattggtggtcaagaaaggatttgttccctgtggaagggcattggaagaggaacagagctgaaacacacgggtgttcagagggaaaacatctctgcacttaagagggctagattagactattagactattatcatagagctcgtgattcatctcctttgtttaattccagccttgagtaaaggactcactaagaaaccacattcggccgggtgttgtggctcacgcctgtaatcccaacactttgggagaccgaggcagatggatcacaaggtcaggagttcaagaccagcctggccaatatggtgaaaccccgtctcaactaaaaatacaaaaattagtcggggatggttgcgggcgcctgtagtctcagctactcgggaggctgaggcaggagaattgcttgaacctgggaggaagaggttacagtgagccgagatcacgctactgcattccagcctggtgactggagcgagactccatctcaaaaaaaaagaaaccacattctattccagtatatttattataaccagaaattcttgtcttatcagcaaatagctaatattcacttacatgggcagtgtattagattcctagggctgctggaaccagttaccacaaaccgcatggccgaaaccaacagaaatatactctcattatctcattattctagaggttagaagtcctaaagcaaggtgttgccagggccacactgcctcttacagctctaggggagaatctgtttcatgcctttcgcttgctctagtgctgctgccagcccttgatattcctttggttggtacatgcacccctccaatctccacctctgtcttcacatggtgttactccccatgtctctgtttctgtgtcttctctaatatgattaagggcccacccttctccattgtgacctcatcttatatctgcaaagaccctgtttccaagtaaggctgtattcttaggtgtaggcattaggacttcaacatatattttgggggaaaattcaacccataatgcggttatgtttttattttccttgacttttaagaatgtgaactattgtcaaattttttcaaccactatcaaatttaaatctaagaactacatgtcttaaatttatgacctcttcattaaaaaaaaaataataacatttaattggtaccaaaacgtgaaagagtttaatgctttgcatttgcttgaggctgattaatgagtaaatgtgtcaactgtggctgttttaattagccagggttaattaatgtttaccacacttggaagatgaaaaggcatgtataaatgctctataatgtgaatcattttttaatttgttgttgaagcttatagtgtagccaagtaaggattgcttacatcatacttacaaagggaggttcattaatggatacaaatacacagtttgatagaagaagcaagacctagtatttaattatcagcaaggtgactaatttacagtaatctactgtatatttaaaaatagctaggagaacctaatttgaaagtttctagcgtaaagaagacaggctgggcacgatggcttacacctatagtcccagcacttgggaaggccgaggtgggaaaatcacttgaccccagcaattcaagactagccagggcatcatagtgagaccccatctctacaaaacaaatatttaaaaattagccaggtgtgatggtgcatgcctgtagacccagctgctctggaggctgaggtgagaagatcacttgagcccagcagttcaaggttcaagtgagctatgatcacatcactgcactccagcctgagtgacagagagagacccttcctcaaagcaaaaagaaaagaaaaacatttaagtgatggatatcccattatactgatttgatctttccaaattatatgaatatattaagttttctcatataatctgaaaatatgcacatctattatgtatcaataaaaaataaaattttaaaaatgtaaaaaacgatgttggagcactatggtacttaacgtagaggctctgacttttgaggtacattcattacctgttactgaagttgagtatgctttaatattgtatgtttagaaaaggtagttacatttttaaatctgattgtgtaagaagaaaagagtagaaatgtttggggccaagtcaataattatttagtatatcataatttgagatgaaatgtgtttttttttttcttttttagtttcaagttgaaacattttaagaacagataaggaaaggctaactgtgctgagatgaaaataacatttttaaagtaactatcttaaagaaaatacatttctagaattttgtgtaaattttcaacaaagactcagaagcctggatgaggtcttgtgccaagactggaaagtgtggggattagaaaaagtttgaagagattgttgtgagatcctctcgtatgaggcctgaagctgtacatccatggaaagcagttaccccaggcgggaaaacaggttatccattctcgagtgagtggccgggtgggaaatagtccatcatgtcgaatggatcgtactttccagcaccaagatttgtggttctctaggtgaataagatgacaccccttcacttcacttcacttcaccattgtctgcatggagtacgtatctaaaaacaaattagcaaaaaggttgggtctactttacttttcatctcctacactattttcttctttgttctcggcaggaaaagatgaagttgcattttattattatctcataggattcttattctaaaatgatttgatttaaaacccattgcactttatttggataaaaaatgcttcactctctagttcttaacaataacaccagcctgattttattacgttaagcactgcaattagacaatacaaagaatttgcagcaacaacatgttattttatcatgggtggaactgttcattgtctagcagaatttattaccagataaatcccttttggggaatctaatgtggatgtttttttcaaagcgcctgtggagttctgctagtattgggaacgtttccattttcattctgatgcttccctgtgggctgtttcagcatagaagtgagctctctgggtccatgtttccattggctccacccaatattctgaaagattgcaactcaacatgtgtaaacagaacctttctcccccatattttctcttttcgtagattaaactcaggtcaagaattagaagtttatcctccaccccgatagcatctcgccctatcccaaataccgccaccaaaatgcccactgtttttccttgggccagttcctgaaatatctttctggctgtatcactcttgtgtgcatccttatcggctatgcttttggccattttttactgctgacttgtctggttagtcttttataatctccaggcttctcctccatcctttttttacagtttacctgttcatgaagcgcaggtcacttgacccgtagaattcccataggctgggattttgctaattgcatactcatggtataggtcagtgtattcctctgccctctgtatcccacaaactgaaagcctcttggctaagctgcttcccttttcacttcccttgtaccacagcagccagaagagtcacagatcctgggcagcttgtcctctgtgcctcggtacatgcacttgtatctgctaggacaatgatctctttccctggggccccactgtaatatcactagtcacatccctaaagcccaggcttgtttctttgtcattctgtcggtatccctaccataacacttgtaatagtaattatttttatgcccatcttttcttctgaaccatgagcccttcaagtgaaaagaaattgatgaagttatttctagcactcccctggaaaaaggaaggcaggcagggagggaggggctcactagtttatgataaagtggtttgattttcttggttgcagattatttcttttaaagtgactcttttcagcttctctcactcctgtgcatcgtgaatgctctcctgaagacagacgctttccattcatttccaagccccccatgtgaagtgctttctgttgccaggcttggtttccccacacgttgttaaagaagttaaagaagcttgtgaataagctaaagcagaggagaaagaaccattgctatatctagaattgttcaccagaaagcaagttttgtgttaaagaaaacacgagtaggccactgtgcagaagtgcttacagggtttgtgtgctttttaaaatctgcataaataaacatttcaaatgagctatcatatatacaaggatgatgtgctgtctgtgggaaaaggacccaatcctgtgttgtgattttacatatatatatatatataatttgtgctattacacacttgcctgatccccttataattatctgcataagtctttttaggctctttgaatgaaattcactatgtatggatgttgaaaatcatcctttctaccatgagctcatcagacttgctaaccaattctttgcatcctttgaagtataaaattccatcaattcagcatgtatcaacatgaatcaattagaatgcactttcttcacagcatggcggagtttttgctggctgccgggaggggcactgtttcccaattcattcatttgcttgggcccgccccaggatccttcttatcccggtcagatagacttctctcatgagcttgagagacggggctggtcacacaggacacggctttagggacacgactcactgaaactacaaaatgagtgctgctcttagagttgtacccacagcctgcacagctgttatggcaatgctgtgggcaagtcttgctacggcccattctcctccctcccttgtcctgttggaaggttcaggttggagctgaaattcagtccagcacgcagctggacaagccatgtctcctgtatgtgactcactccccagagaaagcatcatgtggactagtaagggcttggctttatcagaagcaaaggagaggtttacatctcttcttgctctctcttagtgggttcagagctccagcagaaaaaatgggacactgtggattgatctccagaaaaccccaaaaccagcactgaaggctccaggagattatgcctttagattgtatacaggcaccagaatgacttttgcctttataaaaatgcgtgcaagagcatgaaaactaatatttgaggaatttttttttctcactgtactttctggtcctcactgaaagcattggcagttttaaaaaatgaaatgtgatactgttatagacgtagcaaacctcacgtttcattttttccaattcattctatatctaggaacttacttagaaggagaaacaaactgtacccagaaaaaggaatgaaactggagaattcttcctcatgattcctctgtgtcctcaggcctaattatcctcattccaaagactctccattgcctcaataacttcgaaaaatttactctccttaagcatagtcataaaaattgcatagtaaagtgataaagagacgaaaataatgctgtaagaataaaaccattaaaaaaaaaccactactcttgattatttctgctgttagaattgtaaatgaattctcattccttttttctacatttttggcatgaaatttatgttactcttataattagtaaaaacattatattttattaataaaagaagactcacagtgaagtcataacatatgctgcagaggttagactcttcaagtcagatttgaagagagaatttcacgtaacaatcaccttgaaatgtcttcaggtcagccatcaaagtacacatctctcaaccagccaggcagccagtttttcctccagcatgtgaagagtgaagagatagctgtttcttggcttaaagaccatatgaaataattgacttatgtttaaaagatatgagggatcaggccgggtgcagtggctcatgcctgtaatcccagcactttgggaggccgaggcgggtggatcacaaggttagaagatcgagaccatcccggccaacatggtgaaaccctgtctctactaaaaatacaaaaactagccgggcgtagtgatgcgcgcctgtaatcccagctactcaggaggccgaggttgccatgagccgagattacgcctctgcagtccaacctggtgacagagcaagactctgtctccagttaaaaaaaaaaaaaaggcatcaaaattacattcacttctatttttatttttgtttgtagaagacatgcagtttgtatcacattaatgggcatatgatgtaatttcactataaatcgaaccagaggaagacatccaaatatgtataaattaaagctgacaatgcctacagtactaaactttttgttttagtataattggagacttagaaaagttctaaaaatatatttaaaaatttttaaaggaagttgcagacataatggccctttacacctaaatacttcactgtacgtttcctcaaaacaagaagatatgtgtgtgtgtgtttgtgtgtgtgtgttgtaatcttaatacagcatctttcagagattatttctgtagtatataaacttggtttttttgtttgtttgtttgtttgtttgtttgttttgagatggagtctcgctctgtcgcccaggctggagtgcagtggcacaatcttggctcgctgcaagctccgcctcccaggttcacaccattctcctgcctcagcctcctgagtagctgggactacaggcgcctgcaccatgcccggctaatttttgtatttttagtagagacgcgatttcacctcgttagccaggatggtgtcgatctcctgacctcgtgaaccgcccacctcagcctcccaaaatgctgggattacaggcgtgagccaccgcgcctggccataaagttgttttttagtctctactttaagttcctgacaacccaggcaggaccaagactccctaatgtagttggaaatcagatcagcacattggcacaagttctacaggtaaacgggaaaaaggagccctacaatctgcttttagatgccagggagcctggctggtctttatcttgattactgactgatgccactggtaggtctaagttctttgatctatgatgtttgaaagccaaaaggaaatgtgttttaaaggaaaagggacttcttctgtaccctcagtctaagccagacaagtgatatttcaggaaaatgtccctagcaataaggaatattttcacaaatgatgtgaagctttgtttgtgtcccttccagggcagtttgttaccataaggggacaaagcatgcttcatttaaacatgtgtggccaggaaactgttatttttaaacaaaaataaaccccgatttagacatgtagtctgagttttaactctgggagattttcaagattgatagtgtagctaaaaataactgacctaattttctggaggtcaagataaaaactggatttgtggtacagcatttactttgtgataatatgtgtataaattcttccccaagttggaaaatgtggccgcgtcatacagggctgtatctctcttgaccattgaagtgcctaggtcgctacactacaatttgacttagagttggtgaaacttctggccattcacgtagccatcgtattcatcctgagaaagggaaacctaaagacttgggagagtgttctgggaggaaagtgctattgagaatgggctgtccaagcaaagtgacaggcaggcctcacttagctagaagagggagcttttcagccctgctccaccatcaggaatctccgtgaccttggactactgctttaatctcttttatcctggcttctaaaagataccgtcgaattcattctttttcaaacctatcaaaaatttgaaatgtatgaaaaagagggtgcttgtgatgatagatgggtttatgcttccttttttttttttttttttttttttttgagacggagtctcactctgttgcccagactggagtgcagtggcgcgatctcggctcactgcaagctccgcctccggggttcacaccattctcctgcctcagcctcccgagtagctgggactacagtgccaccaccacatctggctaattttttttgtattttcagtaaagatggggtttcaccatgttagccaggatgctctcgatctcctgacctcatgattccaaagtgctgggattacaggcgtgatatgcttctttaatattagtttctaatccaagtaatatagccatgtcctctataaaatggaacttttcatggaacagtgagaaggttgcattaggaattgggatacttgggttcagatttcagttctgccacttgctagttttaagtatacttctcaggatggatgtcagtttgttcaactgtcagtgggagtagtgatcccactaaggaagattattgtggttatcaaatcagcagatgggtatgaaaaggccatgagtgcagttctcatggttatgaaggtgtcataactggcatagtcccatcacagtatggctttggcatcgcagatggctgtagcatatatgctaatcagaacatccctaccgtccttaaagatctcatgggttctctcccaaatcagctgctccaccgacctacaagtaagtccatgcttctttagtatatttactcactagtgaaggcccgtctgctaaaagtgtcttcagtaggggagagctgctcttttctgggaaacccagcaatgaagtttgtcctgtgatgccctctacacttactgacctgtttcctgagaacttcccgtaacaaatggtccagggaagaaggaagtctgtgaccagtctttcctttcctgtggctttctggttcagaaatgtgaccctgatgataagaaacttcaaggcatgactctggtgttttggcaatattcccctggcagtattgtttcttggctcacactcatctcatgccttgctttgtttgctttgtttttgagaattgtttttttgtttgttgtttgtttttggttttggcttgtgagacagagccttgctctgttgcccaggatggcgtgcagttggcacaatctcggctcactgcagcctccacctcccgggttcaagcaattctcctgcctcagcctcctgaataatggggattacaggcacacaccaccgtgcctggctaatttttgtatttttttagtagagacgggtttcaccatgttggccaggctggtcttgaactcctgacctcaagtgaaccacccacctcggcctcccaaagtgctggggttacaggcgtgagccaccacgcccagccattatgtttgtttttctttcatgaagggataaccgaggctgttgtgtggtggtgtcttggtacagctcgtggctgtggtcagtgtggtggagggtaggtcttctcagatggtaacatgcatgagagtcacctggggatcacattaacatgcagattctgattccctggatctgggtgggacctgaggttctgcatgtctaacaaactcccagagaacacccatgtagcaagagtacagacaaaaggattcaaagcgaagggactgcaagaaccatggaaccagcctcccacgattttgcggatgacgaacccgagccttggggagtttcagaggccatggagagatgaagtataataaacagcatagcagttgtatgttgagccaagaatcagacatgcacagaactgctgattggaaaattaaatctgtttctcatagccctggtgtggcaaaatgcctagctggaagtgggtgaccgcttgatttacagtgggcctcctgggtagggaaaattagtccatcccatttacagctacttccaatgcagctgtgtcaggggagagagaagaaaggacatggaagagagcgtagaggtatgatcttcagtcctttcaggcaggcacataagtaaatttttatttaaaagataagaattggtcatatgcgaatctcctgttagataagattaaaaacaaatttccattttgtggagaagttgcagataaatatttttccatgggatccaaaagaatcaaaaaggaaagaaaatagtaatagcagtggaggttcgatcctagacagaagaaaatccagcaagccgagggacttcatattctcactggtgtccaaatcagagctttttttttttttctttgtttactttaagttctgggatacatgtgctgagcatgcaggtttgttacataggtatacatgtgccttggtggtttgctgcacccatcaacccgtcatctaggttttaactccgcatgcattaggtatttgtcctaatgctctccctcccctttcaccccacccctggacaggccctggtgtatgatgtccccctccctgtgtccatgtgttctcattgttcagctcccacttatgagtgagaacatgagtgtttgggtttctggtcctatgttagtttgctgaggatgatggcctccagcttcatccatggccctgcaaaggacatgaactcaacctttttttttttccttttttttttttttttgtatttgcaaattcaaatctttttttttttttattatactttaagttttagggtacatgtgacattgtgcagcttagttacatatgtatacatgtgccatgctggcgctgcacccactaactcgtcatctagcattaggtatatctcccaatgctatccctcccccctccccccaccccaccacagtccccagagtgtgatattccccttcctgtgtccatgtgatctccattgttcaattcccacctatgagtgagaatatgcggtgtttggttttttgttcttgcgatagtttactgagaatgatggtttccagtttcatccatgtccctacaaaggacatgaactcatcattttttatggctgcatagtattccatggtgtatatgtgccacattttcttaatccagtctatcattgttggacatttgggttggttccaagtctttgctattgtgaataatgccgcaataaacatacgtgtgcatgtgtctttatagcagcatgatttatagtcctttgggtatatacccagtaatgggatggctgggtcaaatggtatttctagttctagatccctgaggaattgcgacactgacttccacaatggttgaactagtttacagtcccaccaacagtgtaaaagtgttcctatttctccacatcctctccagcacctgttgtttcctgactttttaatgatcgccattctaactggtgtgagatgatatctcatagtggttttgatttgcatttctctgatggccagtgatggtgagcattttttcatgtgttttttggctgcataaatgtcttcttttgagaagtgtctgttcatgtcctttgcccactttttgatggggttgtttgtttttttcttgtaaatttgtttgagttcattgtagattctggatattagccctttgtcagatgagtaggttgcgaaaattttctcccatgttgtaggttgcctgttcactctgatggtagtttcttttgctgtgcagaagctctttagtttaattagatcccatttgtccattttggcttttgttgccattgcttttggtgttttggacgtgaagtccttgcccacgcctatgtcctgaatggtaatgcctaggttttcttctagggtttttatggttttaggtctaacgtttaaatctttaatccatcttgaattgatttttgtataaggtgtaaggaagggatccagtttcagctttctacatatggctagccagttttcccagcaccatttattaaatagggaatcctttccccattgcttgtttttctcaggtttgtcaaagatcagatagttgtaggtatgcggcgttatttctgagggctctgttctgttccattgatctatatctctgttttggtaccagtaccatgctgtttcggttactgtagccttgtagtatagtttgaagtcaggtagtgtgatgcctccagcttcgttcttttggcttaggattgacttggcgatgcgggctcttttttggttccatatgaactttaaagtagttttttccaattctgtgaagaaagtcattggtagcttgatggggatggcattgaatctgtaaattaccttgggcagtatggccattttcacgatattgattcttcctacccatgagcatggaatgttcttccatttgtttgtgtcctcttttatttccttgagcagttggtttgtagttctcctttaagaggtccttcacatcccttgtaagttggattcctaggtattttattctctttgaagcaattgtgaatgggagttcactcatgatttggctctctgtttgtctgttgttggtgtataagaatgcttgtgatttttgtacattgattttgtatcctgagactttgctgaagttgcgtatcagcttaaggagattttgggctgagacaatggggttttctagataaacaatcatgtcgtctgcaaacagggacaatttgacttcctcttttcctaattgaataccttttatttccttctcctgcctgattgccctggccagaacttccaacactatgttgaataggagcggtgagagagggcatccctgtcttgtgccagttttcaaagggaatgcttccagtttttgcccattcagtatgatattggctgtgggtttgtcatagatagctcttattattttgaaatacgtcccatcaatacctaatttattgagagtttttagcatgaagggttgttgaattttgtcaaaggctttttctgcatctattgagataatcatgtggtttttgtctttggctctgtttatatgctggattacctttattgatttgcgtatattgaaccaagccttgcatcccagggatgaagcccacttgatcatggtggataagctttttgatgtgctgctggattcggtttgccagtattttattgaggatttttgcatcaatgttcatcaaggatattggtctaaaattctctttttttggttgtgtctctgcccggctttggtatcagaatgatgctggcctcataaaatgagttagggaggattccctctttttctattgattggaatagtttcagaaggaatggtaccagttcctccttgtacctctggtagaattcggctgtgaaccatctggtcctggactctttttggttggtaaactattgattattgccacaatttcagctcctgttattggtctattcagagattcaacttcttcctggtttagtcttgggagagtgtatgtgtcgaggaatgtatccatttcttctagattttctagtttatttgtgtagaggtttttgtagtattctctgatggtagtttgtatttctgtgggatcggtggtgatatcccctttatcattttttatcgtgtctatttgattctcctctttttctttattagtcttgctagcggtctatcaattttgttgatcctttcaaaaaaccagctcctggattcattgatttttttgaagggttttttgtgtctctatttccttcagttctgctctgattttagttatttcttgccttctgctagcttttgaatgtgtttgctcttgcttttctagttcttttaattgtgatgttagggtgtcaattttggatctttcctgctttctcttgtgggcatttagtgctataaatttccctctacacactgctttgaatgcgtcccagagattctggtatgttgtgtctttgttctcgttggtttcaaagaacatctttatttctgccttcatttcgttatgtacccagtagtcattcaggagcaggttgttcagtttccatgtagttgagcggctttgagtgagattattaatcctgagttctagtttgattgcactgtggtcggagagatagtttgttataatttctgttcttttacatttgctgaggagagttttacttccaactatgtggtcaattttggaataggtgtggtgtggtgctgaaaaaaatgtatattctgttgatttggggtggagagttctgtagatgtctattaggtccgcttggtgcagagctgagttcaattcctgggtatccttgttgactttctgtctcgttgatctgtctaatgttgacagtggggtgttaaagtctcccattattaatgtgtgggagtctaagtctctttgtaggtcactcaggacttgctttatgaatctgggtgctcctgtattgggtgcatatatgtttaggatagttagctcctcttgttgaattgatccctttaccattatgtaatggccttctttgtctcttttgatctttgttggtttaacgtctgttttatcagagactaggattgcaacccctgcctttttttgttttccatttgcttggtagatcttcctccatccttttattttgagcctgtgtgtgtctctgcacatgagatgggtttcctgaatacagcacactgatgggtcttgactctttatccaacttgccagtctgtgtcttttaattgcagaatttagtccatttacatttaaagttaatactgttatgtgtgaatttgatcctgtcattatgatgttagctggtgattttgctcattagttgatgcagtttcttcctagtcttgatggtctttacattttggcatgattttgcagcggctggtaccggttgttcctttgcatgtttagtgcttccttcaggagctcttttagggcaggcctggtggtgacaaaatctctcagcatttgcttgtctgtaaagtattttatttctccttcacttatgaagcttagtttggctggatatgaaattctgggttgaaaattcttttctttaagaatgttgaatattggcccccactctcttctggcttgtagggtttctgccgagagatccgctgttagtctgatgggcttccctttgagggtaacccgacctttctctctggctgcccttaacattttttccttcatttcaactttggtgaatctgacaattacgtgtcttggagttgctcttctcgaggagtatctttgtggcgttctctgtatttcctgaatctgaacgttggcctgccttgctagattggggaagttctcctggataatatcctgcagagtgttttccaacttggttccattctccgcatcactttcaggtacaccaatcagacgtagatttggtcttttcacatagtcccatatttcttggaggctttgctcatttctttttattcgtttttctctaaacttcccttctcgcttcatttcattcatttcatcttccattgctgataccctttcttccagttgatcgcatcggctcctgaggcttctgcattcttcacgtagttctcgagccttggttttcagctccatcagctcctttaagcacttctctgtattggttattctagttatacattcttctaaatttttttcaaagttttcaacttctttgcctttggtttgaatgtcctcccgtagctcagagtaatttgatcgtctgaagccttcttctctcagctcgtcaaaatcattctccatccagctttgttccgttgctggtgaggaactgcgttctttggaggaggagaggcactctgcgttttagagtttccagtttttctgttctgttttttccccatctttgtggttttatctacttttggtctttgatgatggtgatgtacagatgggttttcggtgtggatgtcctttctgtttgttagttttccttctaacagacaggaccctcagctgcaggtctgttggaataccctgcagtgtgaggtgtcagtgtgcccctgctgggggtgcctcccagttaggctgctcgggggtcaggggtcagggaccacttgaggaggcagtctgccgttctcagatctccagctgcgtgctgggagaaccactgctctcttcaaagctgtcagacagggacatttaagtctgcagaggttactgctgtctttttgtttgtctgtgccctgcccccagaggtggagcctacagaggcaagcaggcctccttgagctgtggtgggctccacccagttcgagcttcccggctgctttgtttacctaagcaagcctgggcaatggcgggctcccctcccccagcctcgctgccgccttgcagtttgatctcagactgctgtgctagcaatcagcgcgattccgtgggcgtaggaccctccgagccaggtgtgggatatagtctcgtggtgcgccgtttcttaagccggtctgaaaagcgcaatattcgggtgggagtgacccgattttccaggtgcgtctgtcacccctttctttgactcagaaagggaactccctgaccccttgcgcttcccaggtgaggcaatgcctcgccctgcttcggctcgcgcacggtgcacgcacccactggcctgcgcccactgtctggcactccctagtgagatgaacccggtatctcagatggaaatgcggaaatcacccgtcttctgcgtcgctcacgctgggagctgtagaccggagctgttcctattcggccatcttggctcccacctcccgaactcatccttttttatggctgcatagtattccatggtgtatatgtgccacattttctttatccagtctatcgttgatggacattttggttggttccaagtctttgctattgtaaatagtgctacagtaaacatatgtgtgcatgtgtctttacagtagaatgatttataatcctttgggtatattcccagtaatgggattgctgggtcaaatggtatttctagttctatatccttgcagaatctcctcactgtcttccacaacggttgaactaacactctcaccaacagtgtaaaagcgtgcctatttctccgcatcctcgccagcatctgttgttgccagactttttaatgatcaccatcccaactggtgtgagatggtatctcattgtggttttgatttgcatttctctaatgaccagtgatgatgagctttttttttttttttcatatgtttgttggccacatacatgtcttgttttgagaagtgtctgttcatatcctttgcccactttttgatggggttgtttttcttttttttctggtaaatttgtttaagttccttgtagattctggatattagacctttgtcagatggatagattcagatcagagctttaacagccagactttacagggaaaaggctgagtggcacctcctttatatgaagaaaatgttcttctccaacccacttgtgttcagtggatggaagaagctgttcagtaattataactgacacttgtaacacataactgattgatttaatgcccataaattttattttctttaatcgtaagatgtgaccgttaaattcttagaagacatttggctagtggattaataattaaaagaatattggatgaattcatctgcttcctattcagcagttcttttatttataaggctatttttctcaaaatgaatgatcatgaatatctaagaaaaaacaaaatatttagctgtttgaagatgaaattattatcttttgatgttgttttctttaaagtgtttacaatgataactaagtggtagggcttcttccctctgttactctaagtatgcctcgtatacatcctcaaagcattttttttttttttttttttggagacagagtcttactcggttgcctaggctggagtgcagtggcatgatctcagctcactgcaacctctgtctcccaggtttaagcaattctcccgccttagcctcccaagtaggtgggattacaggcgtccgccaccatgcacggctaatttttgtatttttagtagagacggggtttcaccaagttagccaggctgctcttgaactcctgacctcgtgatccacccacctcggcctcccaaagtgctagattacagacgtgagccaccacgcctggccacctcgaagcatttgtaaaagagcaaggtgatggggttcattaggtgtttggtatttgaaattaaatacctctgttattgatgaagccatattttaaatattatcaccactaaactcagttaaatatttccactgttaactacaaggttcaaatgcttggatattatagaagatatttgacttcaaagataaacgctacaattttgggtcataacaaatagcttttagaaggggaaaaaataagtcttgggaggaaaataagcagtctcttagtttaatatagcggttggcaaatatagatgcttaaaagttctgaaaatccccattgcaggccatcagagtgttgtaattaagtattaaattaattcagataaaaggataatccatcagggccactaatgtagtggaagtgtggtttcggtgtgattagtctcaccatggaagtcaaagaaagtcccactcagaatgaacaatgaaagaatcatatttgtctctgggtattttgtcataggctcaattgcccagtgccagtgtgtaagccactggtaaaatcctgagcccttagtcatgtctacaggtagctggctgccttagacattttatgatgacgaaattgaattccacttctgataatggtaatccatcatgtctacctctttttttctcttaaaactacactgacggccaggcgcagtggctcccgcctcatcccagcactttgggaggccaaggcaggcagatcgcctgaggtcaggagtttgagaccagcctggccaacatggagaaactctgtctctactaaaaacataaaaactatccggtcatggtagtgtgtgcctgtaatcacagtactcgggactgaggcaggagaatcgcttgaacccaggaggcagaggttcgttgttctgaatgacatagccaggggtggttatttctaaattttctgtgttgaattaagataggaatgtggatttcttcctattttgaacaacgaccaaaaaaaaaaaacgaaggctaagtgtgtttcactctgctaaaaatgtaccttttcttgaatctgtcactttttcacttacattttctgaaaatgaatataattaaccaccatggggctcagcatgctggtggccatttggaggaacttttctaccaacagtgtaacagagaaaagagaaaagggtactacagcgtacctcaacctcccctgactgttctgtgaagtacaagtgtaagatttctcactgtgatcttttgctcctctgcctttttactgccaagggctaagatgggcacagggccctttccagctgcccctgcctgagaaatgcttatttgatgaccaaaagcaataaccattccataggactaacggtgattaagtcagcttacaaatccacaagggtggaagagactgctaaagatattggaacagacatgcttaataatgcctaatttctacagctacttttgtgataatacgagaggctgaaatagataggggctgaacatgggaaggctggtgttatgaagcccaggacttggatttcagcactggtgcttactggccattgggtcttgaagagattggttcctttctcccagcctcagtctccttgtcccatcagattaataatgcctgccttgggagaggagagtcatacaggagagggcatttgagctgggctctaaagagttcaaataacgtagatgagcagagatgggcttccaagatagcaggaatagaaaacaaaagtgtcagaatgggtatgcatggtcttttgtgggaataccccaagctatttagcctgagagagaggtgtggtgtagacagctggagctgtgagttccatggctagaaatacggggtgggcccagaccacagagggccttcagcatctggcaaaggagttggaattaattcggtagaaaatgaagacccactgaaacaaagagggagccattcttgtgtgtcaggaactaagatttcaggaaccaaacgtaaaataaaaaccagcagggagaccattgtctcagtcggtttgtgctgttatcatgataccagagactgggtaatttataaacaaacaatagaaatactacaattctggaggctgagaagcccaggatcaagccgggtgcagtggctcacgcctgtaatcccagcactttgggaagccgaggcgggcggatcacgaagtcaggagatggagaccatcctggctaacacggtgaaaccccgtctctactaaaactacaaaaaattagccgggcgtggtggcgggcgcctgtagtcccagctactcgggaggctgaggcaggagaatggcgtcaacccgggaggcggagcttgcagtgagccgagattgcgccactgcactccagcctgggcgacagagcaagactccgtctcaaaaaaaaaaaaaaaaaaaaaaggcgccttgtggctgcatcctccagaggcagcaaaaactgttctcacatggcagatgcacataaaggggcctgtgctggtttcctctagcccttttagaaggcagtagtccattcgggggcacggggtggaactgtcatgacttgatttccagaagaccccatctctcactactaccacagtggagatttaagtttcaacacatgactttgggggacattcagaccatagcaagcagtgaggagactatcgtaattatccaggcgaaaagtaatcatattcctaggggcggtgagggtggtgtggaaaagcaagcaggaaatggctgagagaattcagaaatagaatgcaaaaggatttgtcggtagtgtgagtactggacacgaagaaatacagggagtcctggatggctctgaaggattcaagcctgtgactgggagggagaatggttctgccatgattagaaaacaggaaaggtggaagggaaagccagggaccttgagtacagttgtgtacctaccaagtgcatggatcaggagggagccctaagttggtatctccagcaaactgttggaaatatacaaatttgagtgggagggagaagtcaaagctggggaagtacatttcagattcacccaaaggtaggagatctttagagtttcaagagtcgatgggatttccaaaggggagaattgtagaaagagatggaaagagatacaagaagaaaatgacagggatgaagagaggagaaaaaaagagtaaaaagagttattcagagatgtcacagggaagaagataagtactgtgtatgcgaaacagtgagaacatttccaaataaaggacatggtaagtgatagtagataccacagacccaagaacagcgtagcccctggggagttcaagagctttctcgctggcaaaggttatttcctgtcaagatgaatgtgtatgcaccaataattattagtattccagaatatcctctctttagcatagtaagtgcttaacagtcacaagcaaaagatttatataaaagaaatgctcatttaatttatttaatcagacattggctaagttattagccgctacctatggctttgtaaaacatgaaaaagttggaggaaatctaatgagggtcttttatctgtaagggaaaggtcatcatgggcatcaagtattgaattttagaaacggtgccacagtgaatagggatatattataactcagattagacttcaaaaggactaatttgcttgggacttccatcatttaaaatcacttgcaataaaactgactacatgaaaagatattaatcacaagctttaatgctattccatcaaattattttaatgggtatatttgaacagaattttaatttttcagatacattttttgtcaatagaaaagagaatttgaaagatgattgtaaaatgttacaaatcaaatttaaatcctgatcttattttcattttctctagcaataaaactaaccagtgatgtgtctgaaatatatactacagcaaactcttgacacagctatgattggaaaatgagacattttggttaatcaaatattattgttaatagtgcagtgctgtctgtcggtctctaatttgtaaaaatcagagaaaaacatggtgaatctttggtgacataagagaagactcacaaatcttcatatcctggggtcagtttttaaagcagtaattacacatgatacaagattatattctaagctctctttttccagtaagaaaagataagtcaatgatgttccataaagctgattcttgtttaatcaatttttaaagtgggggggtaggcggcactgacagcattctttggaaagggaagcaacagaggagaaaggcaggatatttggtgtctgctcacattgggaaatacggggagccaggggtggttaagtccagagaaggctggatgtctgtctgcagggctacatctggaagggcaagggaacagtttccttgttgcctcagagcataggtcatgcagcacaagaggagcatttaggaaatgcagattttttttcaaggcaagacagtgaaaactattcaagaaggtagcaaactactggccctttaatgcttttcttatccttgcaagtgtgcaaggcaagacaggagattgtctgttgtctttcagcttgaatgagattgtgcctcacttactgccgccacaccaaagcctggcgtttattcctgtgcgatcattgtatactagggacgtctaactgtgtcaggaggaaatggcagctgagcccctgtggcctttcacctctagcagtgccacgctgcagcacattggccggctgccatgctcctgcctgcagtcctgccagcagctcttgtgagctgcgactttgcataagtagcttgaatgccatgtgcctcagttttcacatctgtaaaagggagatgataatggtacctatgtcatggctctaaacgcgatcatgcacgtgaaagcagttgaagtcttgcctggcagaagtaaatggtggctgctgctgctgctgctgttgtgattgttgttactcaccaaagagatggttttgtttggtttagatgagctgcttcagaaagagcaaaactattcagatgacgtcttggccaacatgattagtgaaccaaggatcagttacggaaacgatgctctcatgccatctttgaccgaaacgaaaaccaccgtggagctccttcccgtgaatggagagttcagcctggacgatctccagccgtggcattcttttggggctgactctgtgccagccaacacagaaaacgaaggtaagagtcccctgagccagcaagggcgttctgggaggtatatatacacatacataacgtgtgtgcaagagagagagttatcttttgtatgttcttgagtggtgaattttttttgatgtagtcataaatattttcattataattttactttaaaaagtaaatactaggagttactatgtcattaaaataatatatctgtgtaaattattctttatattttttatgctgcaaagcatgtaaactgccaattgttggaaaagacaacaactccattgtataggtggcaaaacaaaatggtaatgatttacataacatttgcaggtaaagggcctcttgtttcgcacatgtccaggtttgcattctagggaatattatccttcgagtgaacactcccggacgaaggggagccacagtgtattattgaagaggcagttcttcacaaggaaaatgtgtggcaataacattcttctaatttttattttccagttcctcttcttaatataaaatggtacattatataacaaaagtggatacataaagagcatgtactgtatatcatattattatgtttatgactttttcaaatgaggaaatggaggcaccaggagactaagttcttaagtgatgacttttggtaggaattttttagaaatgttttttaactgtgaggtatattgttccctctggaatggaagcacaaaattcaacttgtgtttatgacgtaatgacctagaatgccaccttccaaaaaagcagatagatagtgaaataaggaaaaattacagtttaccaacagagaggagttttgagggcctgcagagatgcagatttgacaggcaccaaagtagtcttcactggctacttattcttacatgaaatttcagattgaattaaatgttaaaggcaaagatagagaactacatataaataaaatttaattttgcttaagacttaatttgtgtttagaaaattaaatttaaggcagctgccaaaattaaggagcacattgctctaaatgttttttcctttggtacctcagagaagtaagattcttctctatcaacaaatttgagcagtagatggcatcctttttcacagggatttcttagcagaaacacctgttcaggcaagaatatctttcagcttcttttatctttttctacatgttcagaagtatacaattacacacaaacaccttgatttctagatacaaataacatgttttttaagaacacaacagcactttacctgattttctttatcaaagcagcaaatgttgatggagatttcatatttataatataccttataggccaggcatcgtgggtcacgcctgtaatcgcaggacttagggaggctgaggtgggcagatcgcaaggtcaggagatcgagaccatcctggctaacatggtgaaaccccgtctgtactaaaaatacaaaaaaaagttagccgggcgtggtggcgggcacctgtagtcccagctactcgggaggctgaggcaggagaatggcatgaacccgggaggcggacgtggccagtgagctgagatcacaccactgcactccagcctgggtgacagagcgagactttaaatttaaaaaaaataaataaataaagtaaaaaatatatataccttataacatgcaattagtactaaatctaaatataatattagaccttaagtgtactggacaagttttttctaaagaaccattgcagaaaatatatagactattttcacaatgtgaatcatcaccccaaatttgtttccttaatttgaaaaagggcaccttacagtaatagcaaacagcatgttactgacaatgtaaaaataattaaaactttaccatttatgaaaataattcttaatcacatagaagaaaacaattttagggacagttcattatcaaagacctggaaaactgtcctgttaaatgtattgagtgcagattgttttgtttctttacaggtagatagattttggtcattgaaggtcctcttcattcagtctctaatgagaatttttagtgaaaaatgtccgatctcattttgtaaattgaatgcacgctaaatttgctcttttactaacagcataccttgttgcatcagccttaggagaaaatctgcgtgcacacgtgtgaatgtacacacacacacatacactgtgaacccttggtaattgccaggatgtccatttgagcaaagcccttgattaagtacttctggatacttgacaaacacgcagctattacattgcctaggtctcatgaaaagagctgatattcttgttggatgattctgtttgaacagtagaatctggtataacaattttgggaggcaatagaacttgcagtgtcagagtcttgagttgcagtactcttcattatcagtcccaacattgacatatatatattgattatagcaaacaatttaaaaagccacttaagcaatttttttttttttttttttttttgagacggagtctcgctctgtcgcccaggctggctggagtgcagtggcgcgatctcagctcactgcaaactctgcctcccaggttcatgccattttcttgcttcagcctcccgagtagctgggactataggtacccgccaccacgcccggctaattttttgtatttttactagagatagggtttcaccgtgttagccaggatggtctcgatctcctgacctcgtgatccgcccgcctcagcctcccaaagtgctgggattacaggcatgagccacggcgcccggccccaattggtttttaaataaaatagacggccatcatctcataggatattaaatactaccccatacccctgaactcctgaatgatacagacccgagtttaaattccagccctgctatgtgcttctgagcaagttacttagcctctctggctgcttcctcgtctgtaaaataaggttgacaataattcctaactcagaggtatagtatgagcattaaataagaaggcataaaaaagctcttagcaaaattcctggaacgtagtaaatgtcagtggtagctttttttttttttaatggagccaggatcttattagagagactttatcagcctgtctcaagatgaatcaccttatggcctcaacaatgtatccttaaaataatgaatataataagccatataatgagatacagtcctaaagccgtctctcttctaacaccgtctcccacctctccccagaaacttgttagtctttctttgtacagacatgtgcacacacacacacatacacccaactactgaaaatatctaaaattctcaaaggatttccttttgttcttcatgcagtcctcattatcatagtttcaaatgcttaccaaaaatttgttgtttttcttaagaacaatcagtgaaatccagaggaggttctgatgcccattttttaaatttacattgaagaaaataagcatatcagagttttccaatgtgctgtgatttgccttaacaattttttattctttggttttcacatccacaaaacctaaatgaatggctaggctgaaatgaagctgttgttacagaattgtgctcacagatcgtgaaatgatctggctggaagcattagcgttgatgacatttgtgtttgttctactttttcctgactgcctgagaagggcagccacaaagagcagcatagcatgcagtgactgccagcaagtctttgtggccaacagtctgcctctttgtagataatacctagatataatatgtagataaaataatatttttaaagagacaaagcaggtcttataagacttgtatggatgtatttgcaaaatgtgaagctgccttctagtatatttttaactagctttatagaggcaatgaggaagccaatttaaatgttgaaatttagattaaataaatatttcattaaacttacaaaccagttcttgtcagcctcttatctatatgtaaaactggtgtactgctgattcctcattacctttggcctggtagagagtttgtacaaggcagcacggttaatagttgaggtttattacaaagaataccagaagtaacagactcaaaaatcccagaggtctgaccattctgtttctctcctcttacagcaaaggatttgattcaaagctactgagagcaagagaataactcatttctgcttacattttattttaactctattaaaagttaaagctaagataatgtatttcttgtttttaaattactaaacagccaatgtaagatgttttttagcacttcattgatgaagttactgtctggttaagtaaaggtcaattggaaaaattggaaagtatttgcagtggattgggaaataacacactactttgttttgttggtgtgtattcttttttttcggcaatgatatcataattgccttttaaaaaacttttaatgtctgctccctgagctacttattttttgagcattaatttatactaaatcagcttcaatcttttaaagcagattagggtttatgtcactgaaactagttttgtttaatcttcctaaaaaatagggttagggttttattattgtttttaaataatacatgcctatttaaaaaaatagaagaagaagaagaagagcggggagaggcagagaaacttataggacaatatcatttgtaagtttctttcacataagtatacgcatttgaaccctggaaaaaccatttactttgtgacacaactgaagttcagaaagaatgtgattagccccagatcacagagaaagtaagtggtgacattagcagtggcccgtgggactaccagctcctcagcctgcatttaaaccacaggtacacttaacttactgccccgagttgcatatacattttctaataacgtaactattgatgtatgtgctcaccaccacttcaaggtacgcgtttgccctcgtgcatgtggtctgttgtgttcttaactgcagttgaagcactattgggtccctcatcatcaggaaattctcacaaagtacaatgacctttcaactaactgcattttacaaggagtaatacagttactcattacaggttgctgcaaataggaaaaaaaatgaagtatagaaaaaccaaacctcattgtcgaaatgtatttgggagttgcagaaggaagtgaactatgtcttcctctaatgcactagtgaaatactagagaatagtcactctcgcatcagtagttactatggaatatttaatcataggatatttaatcagtgcagttctgtagtatctggtagggtctcaaacaggctttaaaggttacttatttgttcctcaccataattagaagatgcagatgttaacatttctgtttccatatggagaaacagccacagaagtggcgcatcccaaggccacagacattgtaaatgttgggcccaggcctgggattagatgcctcaccctccttttgactccaccatgctgccagtctctacatgagaaaggaccaaatttttatttcatccaaatatcctagtgctcccggaaatattttcttatattttggagacttggcttactgccactttttttctccctcactgtttctattaacatgtggcatccaaaatcgatttggactgagaatcccacctttgaatgcctggcctgtgtgcatcagtaagctggatggttttgctgaaattgttagaagccatttcatcgagcacaccgtgtctccttcagcacctgtgctcactttgtcttacctttttccctttacacttgccaccttaccaaagcagcttccccctgcacctacctccgtggcttcatttaccctatgaccattattaatcctaaaaacttcacttttgtccccattccttgtttcttcaaacgccagcgtaaaacaaggaagtattttctgagcatcagaagtgctttggaaaggtcagatgatggtgaggaatatcatgctgtccacactgctttctttgggtcggacccagaacacataaaaagggaaaattgtgaacaatggcaaatataaaatgaaatatcctcatttcacacgtttcagctgtatgtcatctgtcaaatggaagccagcctttttgaaaaagtgagaaaaagactgcggtttccctcttctgccctcatactaaggacaaatttgattcactcactaaatggcagattatatagtaaaactttgctctcctgataaattcatatttgcacttcccctggaaatttaacagagtccttttgtagttaattaactgtaaaataagataagattgggcagttgtaaaaggaagtatctttaaggttttctgctaggctgggaatattttatttctaatcaaaagccaagaaactatctctaaactagctcagagggaaatccaccctccccacccctcttctttgatgttgctgcgtatcctggtgagggcttttattagaaaactaaggagcaggactggcacatcaatagcgataagccatttaaagtggtgcccctcctggtcctcgatgctcgggattaactcactgtggttcttttctggctgctccttttttgtaacttgtttattgcatatgcttttttccctgctcgactatgtttgggagccacgacttaccatcttgatttgtcttgtttgctttctgtgtcccttgcttcctgtgcccagttgagcctgttgatgcccgccctgctgccgaccgaggactgaccactcgaccaggtatcagaaccgcttgacttgtgcctctccgcatcttgggcctaagctcgagcagacgttgtctcctttctgcattttaagcctctctcaattgtacttactgcagagtagaatttgaagtgaccttagaaaccaaacttttaaaaattccccttgactattccttactcttcatttcccaagttccgagtgaaatgattttttttgtttctgagctttccctttgaaacctaaaagagagcccttccaaatttgggtttttttttttcttttttctttaaaacaaacaaaacaaaacaaaaacagagacgattatatacagcctgtccttaaaaacagaagcccagatagatgtagactctcaggtgatgacttggataccagtgtgaacatctctcctttcttgtttggtgtccagatgggtaattttctaactgaactgggctcaaacttcaatcagttactgaagtagacatgatttcctgaaaataccagaattggtttctttccagagcccaaaatacatcttctgttttgtgggttgtatgtacttattctcaatgagtggctaaagtaacacaacagatgtggatgcataattttgcacataagccctttttttatgtattacttaaaaatcccattaacactgaaatagacacttctttttttacagtttcacaaacattaagaagaaacacatttttattttatgaataatgtcatagcacagcagaagcatatatgtgcctggtgtctactctatgaacaacctcacccaactgatagtagccagtgctttcagtgaatcaaaaagaggaagaaagttattgaattgacaaatttgtgtattccagggagattttaatcccaaataacacatacttttccatatttattttcttctttatcctcataatgtccccaggcgatagtcaaagaacagggaattaactttctttgaagatattaatacacagaggtcaacctttgctgcctggttcagatacagtcagcagcagaccaggagacccaccctgtccctcacacttccaccacaggctcgagccatgactgcctccaagcacggtcactgatgaagactgagagtctgcctgtggcatcttcatgcctttatgctgtgattaacagtggcagcagagacagtagtgtgacacgtcttgacagctggtctcgttgatttatgaatttctgtctgtaggcttttaaggggaacttaaattatagtgagtcagagacagtttcagttcttctaatgtcctccttattgtcaatgtcatgtaagggaatctcaaggagccaggagttgacattcctgttctgctcagccaacttgtaaggcctcgggctgagggtcagttcagttctaattgcaaccacagccagctcaggttggtcatttgccttgggacttttttcatggtgcttctctttaaaagacatgctcttcatctacaagcataaaatgtaacttagaaagcgctcattcgactcattcaattttatcaaatttctacattgggccaggagagcctatatgttactattgaaacatccaggaacaggtgacactaccagtcaatgtttttttcttttttaaaaaaattgttttttgattttttttttttttttttgagatggagtctcgctgtgtcccccaggctggagtggagtggcacgatctcaactcactgcaacctctgcctcgggggttcaagcaattcttgtgccccagcctctcaagtagctgggactacagatgcgccccaccatgcccagctaatttttttgtattttcagtagagacgggatttcaccatgttggccaggctggtctcgaactactgacctcaggtgatccacccacctcggcatcccaaagtgctgggattacaggcataagcaccatgcccggcctattcttttaaaaaaaattttttttaatctaaatctaacaaaaaggacacctccaaacgctgtcaaacaaaaacagtgtgttttaaaggaagagctagagaatagttaatggtattacactggtgggagaaaaccatccaaaacctttctcataacagtaagaatatgatgtcacttggggatttcacaaagatcaatccactaaattctttctaggtttgaaagaaattaaacggtagggtccctgctctcaggagcttgaggtataatagaaggaattttgcatatttggaaacatgagatggaatttggaagacaaggaaatacaaagcaacattaagtgctaacaagaatgttctgtgatgggaggagatggagtactaacccaggggcatgttaagtagagaacttactggagatgggcttccagagaggttatgaaagatttgaggcacctggattggcaaagaagaagggaacaattctattcagaagagagggtggcctaagccaagcttcctttcatacacagcgtaggcttgggttgcccagtaagatggctaaagttgagaaagaatgctcagatatgaagtgaggaagattctagttaaggtttgtctatgaatagcagtatttactgcacatgtattaagccatgcgtgtgttctgtttttgtgcttgtagtaagtttatcaaacatttgggctaatttccccgtgttttgtagcatagctttggttcttcttcacattttagagaccacccacttgagtctaatgtgccgaattatatctttagcctttccaaacttagaaagccttcccaagattgtcatgccgttcaagtgatggcattgtttttgaataatcactgttgtcctcagaaacaagttaaaaaaaggtttttgtttttcccccacccagtgctttataatcatgactgaggaaaatggcttctccttaactctcatatctaaaaaaacagaatatggtagcttccagcatgcagtgtcaagtagggaccattgtaataacagtggtgatttgggggcatagtggccattatagctcctcctcctggcttacttccaaagaaaaaatagactctgaaggactaattatacagtttgaccagaataaaaaagaaaaacacattagcgagctcttcacatagggtagaaagctaccctttctgttacaattcatcaccacccttctgcagtccaaataaagggaaaccaggtccttgacccgagccatgcaagaggtgtcatgaaggacatacctcccttagcccccacatgaacaaaaggctctgtccactcatcatgacttacaggaagagagagctggagtcaccagggcttagggtgaaatcagcacaactcaagaaagacctctaagtaagcctgcaaaccaaggtccctgccatttatttgaaactactcatcacattttattacatgcattatcaccttattatgaatatttccctatgtgccagcttactgattttgtcttttagtaagatttgcttaatgtaaaaagtcttccctagatgactattcatgctaaacaaacatgaactattatagcaagagctcttctgccaagagcttctcaaactattgagctgtaaacatgaatttatctgtcatgctgacttgataatatgaatttttttttttggaccaccaaaagtattcacagtatcatttcaaaagtagtgtgggcttgtaaagtttttagtggagagctcttggttttgttttttttttttttttttttttaaaacaggatttgtctctgtttccaggctggagaacagtggcatgataccagctcactgcaacccccatttcctgggctaaagctatcctcccacctaagtttcccatgcagctgggattacagggatgtgccaccacacctggctcatttttgtatttttagtagagacagagttttgccatattggctaggctggtctcgaactcctgagttcaaactgtttgcccgcctcagcctcccaaaggctgggattacaggcatgagtcactgcacctggccgagagctcattctttttttttttttttttgagatggagtctcactctgtcgcccaggctggagtgcagtggcacgaatctcggctcactgcaagctctgcctcctgggttcacaccattctcctgcctaagcctctagtagctgggactacaggtgcctgccaccacgtccggctaattttttgtatttttagtagagacggggtttcaccatggtcttgatctcttgacctcgtgatcctcccgcctcggcctcccaaagtgctgggattacaggtgtgagccactgtgcccggccagagctcattctttacttttatttttcagtataaatatttggctccaaaatctaaaagggaagactcttcaaactgttcaagaaagttttcttaaaaatctcagaaatatagttctaacctattgtgttgctagatcttttatttatttatttatttttggagacagagtctcattctgtcacccaggctggagtgcagtggcacaatctcagctcactgcaacctccacctgccgggttcaagcgattcttatgcctcagccttctggagtagctgggattacaggcacccgccaccacacctggctaatttttttttttttttttttttttttttttttgtatttttagtagagacagggtttcaccatgttgaccaggctggtctcaaactcctgacctcaagtgatccacccagcttggcctcccaaagtgctgggattacaggcgtgagccaccgtgcttggcacgttgccagatcttaataacagaaaaggagtgagctctaaagaaatcactggttatataaggatctcagatttaaaagggctatagaaagattaaaatatacagccagtgagaattaagagagttttagcatcactaccctataaaaataagtgtcagaaaggttcgtttcagcagaatgagttgaaacttaaccaaaaaatacttaacaatattaaagtaagaaaataaataagaatagagaactctgtgggtctcgtagcaagaagttgggggttgagggttaggtcattgagaggaccagagttaaagaatgagaaagggaaactgtcccacttccattgtgccttttatgtctatattaaagagaatgaacttctgatgaaaggaaattaaagcccgagatagatcaacatgagaaaagaaagccctagcccattagttacctattgctacgtagcaaataacgcgagaatttagcagcttaaaacaacaagcattagtttcttacagtttttataggtcaggatttgggatgtggtttagctggatggttctggcacagtgtccgtcatgtggttgcagttaagacactgcctgagctaaagtcatctgaaggtttgattggacctggtgggtctgtttccaacgtggctcactcacgtcactgttactaagagacctcagtatcttaccatgtgaactctgtaatgctgcttgagcgtccctacaacatggcatctcgcacccctgcaccaagaggtccaggaaagagattaaggaagttttagtgccttttttggcccagtctcagaagtcatacaccatcacttctatcatgctctgttcactagagcaagtcactacatcccgaccacattcgaaggaagggaatcaagttctccctcttgaaggaaggagtatcagcaaatttgtggatatattttaaactatgacatcttgctacccaagtccaagttcttatgacccagaccaactgcaggctaagagaacttgaaggggaagtagcaccattgcctgtggtctttgtggaaagctgggaaggtagggataggaaaatgaagttctgaatagcaaaaaggagagaagatagcttcacaatctgtaagccaggtatagagtgacattgattgtgggtctcttttcaaataggttatcaagtggaagctttttgaacaattggatgaggaaatggtgctaggtcacaaccagcgtggatttcctaggttttgtcagattatccttaccttctccttgtataggctgtgctcttagactggcacatcatatgctgtggacattgtgcttttcagtgtcagcaagatgtgtcacaagtttcccagaatctcgtagacaagattgaaagagtgattaggccaagagcaggaagtgaattcccctgggagccaaaggaattgggaatgtgtagcccaagtaagacaagaaccagcaggaacatgcctctccttagggtcgtgatacctgttcaaggttttaatgtggaagggaggattaggcttgctctgtgttgaatcaggctcaaaggatggaagttacagggaagctgattctggcttcatgtaaaaaaaggacagtttgggcaggcaaatctatcaaaaaatggagggaaattgatacattcctctatgttcaaacaggaactgacaatctgcccctgggtgggaacacggtagagaagatgacttcaaaagcccttttcatcctaaaattctgatgtttgataattaaatgttatagcatggacactgacatttacattttttacttatgtttttggtttttaaatgactctgcattttgttttaagcttcaaattattatttgaataatgaaattcatcagaacaattagtgttaagaatcatatagcaatttatagaaaaggaagagttcgtaggttataaattctgttagttgctaagaagcatttttaaaattatgtactatagctctttattcagcagacgaaccaattacaatctgtgtaactagaacacttgactaaaattatataatttttacaacgcttcactgcatagatacatgaacataatttatttgtaattggaacaaagccccaaagtagcagttttgttctaccaggtaattaatgctcatttttaaagccttttattattatttctgaagtaatgagtgcacatggaaaaagacacataataggctaaacaataagcccgtaagccaagccaacatattccaggaacaaatccttgccaacctctcaaccaggatttaacttctgcttttcccccattttcaaaaattatagcatgtatttaaaggcagcagaagccttactttcaggtttcccttaccctttcatttctttttgttcaaaataggtagtaattgaagttttaaatatagggtatcatttttctttaagagtcatttatcaattttcttctaacttcaggcctagaaagaagttttgggtaggctttgtcttacagtgttattatttatgagtaaaactaattggttgtcctgcatactttaattatgatgtaatacaggttctgggttgacaaatatcaagacggaggagatctctgaagtgaagatggatgcagaattccgacatgactcaggatatgaagttcatcatcaaaaattggtacgtaaaataatttacctctttccactactgtttgtcttgccaaatgacctattaactctggttcatcctgtgctagaaatcaaattaaggaaaagataaaaatacaatgcttgcctataggattaccatgaaaacatgaagaaaataaataggctaggctgagcgcagtggctcaagcctgtaatcccagcactttgggaggccaaggcgggtggatcacgaggtcagaaattcgagaccagcctggccaatatggtgaaaccccatctctactaaaaatacaaaaaagattagctgggtgtggtggcaaacacctgtagtcccagctgctggggaggctgacgcaggagacttgcttgaacccaggaggtggaggttgcagtgagctgagatcgtgcctaggcgacagagcgagactccatcccaaaaaaaaaaaagaaaagaaagaggctgtatgtatagttctttcagactacaaggcagcaaagttcgtgcatgactcgggacttaaagtggaattaatttcaatatagcagccactttgacttccactgtgttttctgggaaaataggtttacaataggtttatttgaaggatcaaacacatgcatacactgcttggttttacagaacactttatgtggcttaaattcacatccggaactgtcttcctttacccattcatttctcccccagctctttcttttcattccctcccctacctcccatgatttaacttctcttgcaagagtaagatcatggagtgagcaggaccccatgatgttcccgatagtgttattcatcaaaaggtttgtgcaaagaagacagcagcttccttttcagatgaaatcacttttcccccctaatgttagaattggagtaaatcaaaaagccacatctcctttgtggtcagctctagtagttatataaaatcctttaccaaaagcttagaaatggagataaatcaaatcgtggattatgttagggttccatcttatcagtaggtgcagtaagagggttaaattaatgaagacgacaattttatcacattcagtggtggacagaaaaatggtaagaaaatttccatagcaataatacttaaagttatctcaggcacttcttttgttttgttttgtgtgtgtgtgtgtgtgagtgttacttttttccaagcagaaaatgtcttttcaatattcataaagttgataaatcctagtattaatctctaaaagaaacacctccaaattattatttatgccttacttgactccaaataattgtagcaaataaaaaactgacttgggatttggatttgcattcttaactcccatagttctttttttgtagaaagacatttagctttttgaagcatggttttcattggcaagataatctagtatcagttgttataagatcagggtttctcttgatgaggctgttgctgaagaggttaataaaaactggggaaccactaaagagttgaagagttggtggggtagaaagctgacgattaatgtacagatttgcatttgtcggggcctggggcctgtgtcatataagcccatccccacaattacactaacgcctataatgcgacagtgactaatggcagcggcagcaattaggagaatcagctccctctactggactagttaagataatgtattataattagtgcaatgaatattacaaaattacagtattttcttaaaggcacaggcatatgtccagacttgtatttattcctgattacctcacactagtatattagctaattaatgatttgcttttcataaaaatgttgagctagcatatttgtttagtaaagggaataattatgaacaatttctcattttgttataaaccacgagtaaaacacttttagaagttgcttcatttgctatattttatattgcctttccagattgctagtatgttagtttcagcttagaaaaatcagtcatttgactaccttgaggctaaattgaaagaattttttagggaggtacaggcataccttggaaatttcagaacaccacaataaaacaaattttgcaacaaaatgtcacacaaattttttggcttcccagtacatataaaagttatgttggccaggcacggtggctcatgcctgtaatcccagcactttgggaggccaaggcaggtggatcacaaggtcaggaggtcgagagcatcctggccaacatggtgaaatgccatctctactaaaaatacaaaaattagctgcatatggtggcatgtgcctgtagtcccagctactcgggaggctgaggcaagagaatctcttgatcccaggaggcagaggttgcagtgagccgagatcgcactccagcctgggcaacaagagcaagactctgtctcaaaaaaaaaaaaaagtttgtatttacactatactctagtctgttacatgtgcaatagcattatgtctaaaaaaaaaaaaagccatgtatatactttacttttattagtaaaatattttattactaaaaatgctaatgatcatctgagtcttcagcaagtcctaatctttttgctcgtggagaatcttgccttgatgttcactgctgcaggctaatccaggtggtggctgctgaggtttgtggtggctgtggcaatttcctaaaataagacaataatgaagtttgctgcatcgattgactcttcctttcacaaaaagatgtctctgtagcatgtgatgctgtttgatagcattttgctcacagtagaacagctttcaaaattggagtcagtcttcgcaaatctagccactgcttcatcgagtttatgtgatatcctaaatcctttgttgtcatttcaacagtgttcatagcatcttcaccaagagtagattccattgcaagaaaccactttctttgctcatccataagaggtaactcctcatccattcaagtttgatcatgagatggtagcagttcagtcatgtctttaggctccacttctaattctagttctcttgttatttccaccacatctgctgtgacatcctttactgaagtcttgaactcctcaaagtcacccatgagagttggaatcattgtcttccaaactcccgttattgctgatgttttgatctcccatggatcacagatgttcttaatggcatctggaatggtgaatcctttttagaaggtttgcagtttactttgcccagatccattagaggaatcgctatctatggcagtgaatagccctacaaaatatatttgaaatatattttgaaataataagaggctgaaataataagacttgaaagttgatccacaggctgcagaatggatgttgtgttagcaggcatgaaaacaacagtaatctccctgtacctgtccttcagagctcttgggtgactaggtgctttgttagtgagcagtaatattttgaaatgagtcttttctgagcagtaggtctcaacagtgggtttaaaatattcagtaaaccatgctgttaagagatgtgctgtcatcccagttttgttccatttatagagcatgggcacagtagatttagaataattcttaagcgccctaggacttttacaatggtcagtcttggcttcaaaaacaaagtcgccagctgcattagcccctaacaagagagtcagcttgttctttgaagctttgaaggcaggacttctctctagtgatgaaagtcctagatggcattttcttccaaataagtctgtttcatctccactgaaaatctgttatttagtgtagccaccttcatcaggagtcttatctagatcttctggataacttattgcagcttctacatcagcacttgctgcttcaccttgcacttctgtgttatggagatggcttcttcccttaaacctcatgaaatcaacctctcccaacttttttttcttctgcagcttcttcacctctctcatccttcatagaattgaagacagttgtgggccttgttcttgattaggctttggcctaagagaatgttgtggttggtttgatcttccatccagacaactaaaagttttctccgtatcagcaataaggctgttttgctttatcatttgtgtgctcactggagtagcacttttaatctccttcaagagcttttctttgcattcacaacttggctaactggcacaagaatcttggctttcaatatgccttgcccactaagcttaattatttctagcttttgctttaaagtgagagacctgtgactcttcctttcacttgaatacttaagaggccactgtagggttatttactggcccactttcaatattgttgtctctcaagggatagggagcctgggagttgagggggtggagtggccagtttggggggcagacagaacacacacaacatttattgatttagtttgctgtctttatgggcatgtttcatgacactccaaaacaattaaaatagtaacatcaaaggccactgatcacagatcaccaaacagatataataatttttaatgtttgaatatttaaataattaccaaaatgtgacacagacatgaagtgaacctgtgttcactgttggaaaaatggcaccaatagacttgttcgatgcagggttaccagaaacctttttgttttttttttttaaatactatctgtaagcactactgtacaataaagctatgtatgcctgtattttcattaagttgcagagcaaacgtggtaatatttagctttagttttacttcatctggcataagatcaactccttatataacaagatgataaaagttgtggtgtgcttctataatttcattcaagtagataaagttgaaaaataatgacttgcttttataaacagtatgaagcaatgtagtgcagtaaatgaaattttattccttctttacaatgttctcaaaattatttttatgtttaatccaaataaagagcaagaataaagcaacatttcagattttggtttctggagacaatagttagaaagcatgagttatgagtgacttaaaattcttgttgcctgtacttcactttgaaataacattatgctttaaaaagcattacactgctaaaggttaattagaattctgcagaattactatagctaaaagtaggtaacaagatatctttttttctattgtttaactcctttgtttcagaatgcctattcctgtgcattaaaagtgtccctccaaggaaattaggacatctgcagagttgaaaaacacctaagtctcagtcacttagagtcacacatcagggctcagagtgctatgactaggaaaatgctgacctcctttcattagtatgatcgtgcctttccagcttttgatagatccaagcgctatcttcccaccactcaccaaatgttccacctgtcaaagggtttcaggtccctgcagacttcggttttgacctgtggggaaagtagacttcctcgaactggggaagccacatgttgtacatccttctataaactatgattatcattcttagtaggaaaatatgtgatttctttttttttttttttttttaaagtaagcatcaaatatttgaccaaccagttgggcagagaatatactgaaactttttatataacctcatccaaatgtcccctgcatttaagaaatgaaattcttctaattgcgtttataaattgtaaattatattgcatttagaaattaaaattctttttcttaatttgttttcaaggtgttctttgcagaagatgtgggttcaaacaaaggtgcaatcattggactcatggtgggcggtgttgtcatagcgacagtgatcgtcatcaccttggtgatgctgaagaagaaacagtacacatccattcatcatggtgtggtggaggtaggtaaacttgactgcatgtttccaagtgggaattaagactatgagagaattaggcttagctttttgctaagaactagctaagtatctcttttaaaaaacgaatcagtgtgcttccatgatgcttgggttacagttgttctttcttgttttggttttcattcattgcaacttaccgtgaatattctgctcaaggtattgagagtgtgtgttgttatctcaacttacaatttgtgttgaagttatcaaaataatacaaatgataatgcatgactttaaaaaagcatgattactcttagacttttttttttcaaacacaagcaacaaaaaccagtacaagaagttaaaaataaaaatagaagtaggaagttgctttttccaaaaaaactaaacatgtttattcttggatttcttttgtcttaaatagtctggcctctcaatacaaccaggtaatagtaaataatgtgacttttcagtgcagactcttacctttaaagtttctcaggaaatcacactataccaaatggcccaccaaaacatacatgattgttatttgagagttctgcaacctattaccctgcacttccacctgaaatatcttagtttcaaggtgctatactaaaacaagaaagagagaaagaaaatttacgaataagttatttttatgcatttgaaatgccatttggatgggggaaaaagtgttaaaatctcacagtatatgcaactttttaggaaactgtcttgcagagagtatagtgtaaacataacttttatatgcacagggaaactgaaaaatttgtgtgacatttaattgcgatattttaagagttatggaatttttagagctgaaagatttattgatgatgaccaatcaaattgatcttctcatcttgtagatgagggaactgaggccgagacagaagggttcaaattatgcaaggtcaagctcagagtccagatttcccctcatattccccattgctttttttttttttttttgagacagtctcgcgctgttgcccaggctggatcttggctcactgcaacctctgcctcctgggttcaagcaattctcttgtctcagcttcctgagtagctgggactatgggcacacgccaccatgcccggctaatttttgtttttagtagagacagggtttcaccatattggtcaggctggtctcgaactcctgacctcaggtgatccacccgccttggcttcccaaagtgctgggattacaggcgtgagccaccgcgtctggcccccattgctttttccatcagagaaaagtccaggtgtttctagggagttgaagattccactatccccaaggaaatgggctctaaaccattcttgattagaagaggacaggcagagtttaaataaatgaaatttgtggtgaagccagaaatttcattttgctcagcaattaaaacctctgcagactacaacagaagctgctgatggaaattggggtggagcctcatttccccattcatactgacgtggatgagcagtgtgaggaaggaaaccaagagaacagcaggcagcagggtggaaaggaacggactgacccatagatcagagtgtgagcacataaaagcaatgaccccactgtcatgtttggccattgcaccttttgtgatagtatctaagcttatgtccctcaaaacagtgtaagataggttttcattagtatcagcttatttcatttctgctcaaattaatttttaaaaaaatttaattccatatttgagcaaataaagatgtcttcatacttgagtaattcaagaccccttttttgctgctgttgttgttttggtttttttcatggttttgttgttttcttttgttgttgttgtttctttgttttttgagatggagtcttgctctttcacccaggctggagtgcagtggcatgatctccgctcactgcaacctccacctcccaggttcaagcgattctcctacctcactctcagcctcctgagtaactgggattacaggggcataccaccacgcctggctaatttttgtatttttagtagagacagggttttgccatgttggccaggctggtcttgaattcctggcctcaagtgatccgccctccccaacctcccaaggtgctgggattacaggcatgagccaccatgcctggccttcaagagcactttttagtttatttaatataattctctttgttgccggtctgtccgttgaagttgccttctttgatgccagaggccaaagacttggcttcctcgggcttccataacaaagtaacacagatgggtggattaagcaacagaaatttaccctctcacatttctggagtgtaagatcaaggtatcagccaggttggttcctccccaggcatctctccttggtttgcagatgcctgtctgctccctgtatcttcacatgaccttcactctgtttttctgctgtgtcctaacctcttcctacaaggacaccagtcatagtggattaggatcaaccctgatgaccttgtttaactttaataacctcttcgaccctatctgcaaatacagtcacaggtggaggtactggcagcttaggacttcaacatatgaattctagggggacacgttttagcccgtaacagaccccagtgatgctgagcataaaagcaaggcctccacctggagctccttcccctggctgtgcgtgagaccaggtcctacctcagacctaaggaaaaagaatccccaaataggaggctgcgaatctgagtgttgaaaatttccccaaatgaatgagatgtgcagtcggatttgagaatccctgacacatcattttaacactccttccttttagttctccgcgcaagcctcagggagtggaaaatggtatctctcacctcccagataaccggttgccttttaagtgctcttccagctgcctgaattaaaacgctctttttttagtcagtttaccaagcagtgtctcattggacttaaaatgtcagaggagaagttgacactttgacccagattctgacattaatttttaagccaggaggtatccttgcaggagcaaaatcgggaaggatggctgttcagctcttctctcctcattttgctgtctactggagagcaactggaagcctttctagatgaggggctccacctcattcgtgtttgttttgtttatttcctctcagctccttcccctcaagacctttgtgactgtccttcctgaaagcagccctctgtgcagccccatagtgtgtctgtacagcaatgttgaaatagaccacattccgcttttctgtcctcaaaaaagatgtagtttagctgggatggtagaacctgaacacagggagttgcaacccagcctaggcatgttcccaggtgagagagcacggtgggctttcagagcaccatttttcttagcattccagcgtctgcacccacagaagtgatgcttctgcaacatcctcttcctaccttaacaggcactctcaccctcaagtacatggaaatacctttatttccggctctggctaaccttcattaatcagtaaccctacttcagtaagaacaaaaatgagtacatcaatatttccagttggactcacctcagtcactcaggacagaataccattgtacttacataccatcgtgcctgaagaagtcatgatgaaagctttggtttccaggagattttttgtttttagagtgaaaaatgcccgcagaagatcacagagataggaaccctaggaaaaaaactcctgagaacaaatgtataaatgaaacaagcctagaacagtcacataccacttcacactggagagaacgttctgagaaatgtggcatggggcggtttgatcgctgtgcaaacatcataaagtacatgtacataaatctagatggtatagcctgctacacacctgggctacacacctacaactattgctcctaggctccacacctgtgcagcatattgctgcactgaatactatagacagttgtaacacactggcagggatttgcgtatctaaacaaactagaaaaggtacagtaaaaaatacggtattatggggccaccatcatatgtttggtctgtcgtggactaaaatgtcattatgtggcccataactgtatttttattggtagagttgttagcatttggaaatgagcacttgctagttgttgtttttttttttttttttttttttcaaataagcaggaaatattgacttactgaatttacttagccataaggccagagagtcactctgtgagccattggccacgctttcccaaggaggtaactgtgccttattggtgcttcaagcagtgaagcaatagccctttattattaccactccccaaatgtgccctccatgtcagaatagccctctggtggctggaaatctcagcactagctgaattaaccaccttgctcctgttttaggacgttcctgcaaagcccactaatcccaggatctgtttagtagcaagcggtacttttctacattcacatacatagacactggatatttaaaaatacgtattgtagctctttctgctactctccccagacatgtcacctttaataaggagaagttgggggcacagcttctctttattataggatgtgaaaaagttttcctctcacagatctgatcacttgaacaccagaagtctccccgcccccacctcctggttatctcattaatgatctaaataagaagagagttccttttatttggcttttatggaggtatggcatatgactttttctaagtaatatgctgtcacactggtgactgtataaaaagatgtccttagaggtcctttcttcccggccagaagctgacccaccaggatacagacgcactgacgttggcattgtagagtagttggagagagtggtcaggttgaatggaaagccacgataaggaaaagtgagggggggtgcagaacctaggagtggcttacagtgagcagcaggaagagaaattggaagatcaaaggaaagcatcaaaaatgatcacaggccaggcgtggtggctcacacctgtaatcccagcatttggggaggccaaggcaggtggatcacttgaggctaggagttcgagtccagcctggccaacatggtgagaccctgtctctaataaaaatacaaaaaattagccaggcgtggtggcatgcgcctgtagtcgcagctactcaggaggctgaggcaggagaatcgcttgaacccaggagatggaggctgcagtgagccaaaatcacgccactgcactccagcctgggtgacagagcaagactgtcttaaaaaaaaaaaaaattatgaagggatagcaaaggagttcctgaacctgcctgaagaattgcttgatgttggccataaacatagtcaactgccttctagttatatataactatagagagatggcatcaaaattaggaaaacaagcatctatacaactaggtagcaggcagttactgggaggttacgagggataagtcactagcttgaaaacttcctattttctttgcttttattttttttttccgcagacttgtggctcctttgatgtgtcacactattgttgtattgttcgccttagttcccttaccctcctttactcgtctggtccatctcaatgacaggattctgtcgtttggcctgactcagtcccttgtataaaaggacatctattaatccacatcctgctggttactgtacataataaaatgtaaacgtggtgtttcctgcctctcctccaagctcacacacccgcatgtaaatactctaggggcaataggaggagacctagaaactaaggtcacccaaatagaatcttgtccctgcaggcggatagctgagctctaaattactctggatacagtgaaggactaaatggttccaatgaatcaagttcagggagaaaagggtcagggggtatggaggttagccaaagagtgtcaaacgttctcctcaaagctattttagaacaaggctggtcaggctatttgggctcagctcttttcagcgtgtgtcataggcagcagccagttgaagccatgccaccatgcagtgcaggggtccaggtctcaggaaggtgcagcgtaccgagagtcacatgaagacctcagatcatttcctgctgctgtgtaatccaggcagtctgggaagagaatgaatattcagtggttgtatgtatgtgtgtcttcatcccagcaagtgacagatgttcctgcccagttggaaaatggaaattctgacttcattgtcttatcattccttccagaacaagcaccatgggctcaaaccctccctggctctgctttaagggaaataatattgtgtctgtgcagaggccctgtctgcacagggtcgtggtagggctggccttcacatggtggcccatgccactgctgtagcttagccatgaggaagagattggtgagcctgctggagaggaaggctacccttacttggtgctcctcctttatccatagacatgagtactcagattttcgcatctagctttcaaggggctggagattaaagatccaatccatactccttggatgcccttttgtcaagataatcccttcttctgtagctcctaagccctctaaggtctgagggccaagctgccccatggcaggaatggcaaaatgtagctgtcctctcagtggcaaaaggtaataggattatcaagtagcaaaacagaagccaagaaaagacaggagagttagaggtctggattgtgcaccagccttggagcctcgcatctctagcagggcactcttaagcgttaggctttggagtttgaagaggagataaacctatcaaattgccaggtgttcccctgcccttgatgcatgcaaatgattgttgacagccagtgtgatggtagatgtgcctcctggaagaaataaaagtataatattccaacaatcaagcagcattgtggcttttttctacaatcagaaacatagcagctttgtgcttgatctcctaagcaagataattttttttaacctgggcattctttgagttctcagtttcgaggtgatggggagcaaaaatgatgcccaagttcaaatggcgtactgctgcagataggctgtctcctggcacacagatttacagagtgaatgaaatctctcattattggtgctaatctttaaccatggtttttaacttacaagttggaggctaattacacagttaccagttaaagccaggtgacctcatttgttgacaacagtgcacagcaaaggaaagaggagaggataaggaaaatatctgtgatttgctcccagaaggacagtgaagctgagcatccatttgagcagagtcctctgagtactggccttggtcagagcttgttggtgggagtgtgctaaggggagatgcctaggtctgtcattggagtaagctgagggtttggatgcaggggaactcaggcagctctgagccacagggtggtagatgggagggattcacagtggcgcacagtctcttccataaatggaaacgtaagaatcggggcacatggccatggcggctcatgcctgtagtcctagtgctactttaggaggccgaggtaggcggatcacctgaggtcagtttgagaccagcatggccaacatggtgaaaccccatctctactaaaaatacaaaaattagccaggcgtagtggcgggtgcctgtaatcccagctactcgggaggctgaggcaggagaatcacttgaacctgggaggcagaggttgcagtgagccgagattgcctgggcaacaagagcaagactccaactcaaaaaaaatgggcacataatggatggaacattctgtcccaagggatgagggagctgtatatctacctattccagctgccttgggattagccactggtagtcattccacctcactcccagactgaaaagagtcaatcacttcatgaagtggggctatccgaagggaccacaggggacctgattatactgacagatttatttttatttatttactttttttgagacagagtctccctctgttgcccaggccggagtgcagtggcacgatcttggctcactgcagcctcagcctcctgggttcaagcagttcttctgcctcagcctctggagtagctgggactacaggcacgtgctactgtgcctggctaaatttttttgtatttttgttaaagatggggtttcactatgttggccaggcgtgtctcaaactcccgacctcgtgatccacccgccttggcctcccaaaagggctgggattttgagccacctcacctggccttttttttcttggagatggagtctcactctgtctcccaggctggagtgcagtggcacaatcttggctcactgcaaactccaccccccaagttcaagccattctcctgcctccgcctgtggagcagctgggattacaggcgtgcaccaccacgcctggctaatttttgtatttttagtagagacaaggtttcaccatgttggccaggctggtctcaaactcctgacctcaagtgacgcacccacctcaggctcccaaagtgctgggattacaggagtgagccactgcacccggccatattgacagatcttttagtctgaattgttatcagccagtgtggtctagtcatgacatatctagctccatctcgagacctcatgtcttactgctgacactacatcctcgctggtactttttcttccttggcttcaggggcattgctgtgtaggctcagatccatgccagatggggtgtgtagggggaaaagctgcataagggaggaatgtcacttggcaacactcaacaagggggaatgggcctgcagtattctcccagagatgaatgagcagcccattctaggaaatatccctttgaaggaatatcttctctatggtacatccaaacttttctctggaaaacatgcctcttcattctgatgactttctatttattctcttcatcttaccatggttttacaaaagaggaattttaacatactcattcagcagagttaaggacctcctctcttctgcgaacggggagaggtataacaaatatagtaaaacaagaacagccactgcccacgttgtaggggtaagtaccctgcccaacctgcagacagtaaatgccacacacagctctaacagtgacagggggagaaaaacgtcttcagttactggcctgaccttagaggtaaagcaacatattaacagagagggtctgattttaaactttgagctgaacatacttctatagtatcttaattctcagtttttaaaaaattacatcatctagaatggcgtcgtccttgctcttccttttttcttgtgccaaataatagccccctttggtatatgttattgttttaattgattctcaaacctctccttaacattttaacaaacataaaatttgatagaaatgggctagactaaattcagcagtccaggaaatcgagtatttttctacacagatttgagtgtcacccaagatacagtatactttgctgaatctccctccatgatactcttgtggttttatctattttaccaaaacacttccacgtaaaacaggcttccgttgactctgtttgtcctttatggacccaacaggggaggaaaaaataccattgcactgggtttatccacttactgtggagttggggaaccagaaacaaccactggacacgttgcaagcgcgtcaaggtttccaccgccacctggtggctagatggagcacagcatctgtgtaactggtgggcaaaggcgttctgctccaagatgtcaaagtgggggagaaaattatgggtgttctgcaatcttggcaaaagaagagtactgtactccttatctttttactgcttctccatgttcacccttaaaagattgatttttattttttactcagctctcctcttgtttttcaggttgacgccgctgtcaccccagaggagcgccacctgtccaagatgcagcagaacggctacgaaaatccaacctacaagttctttgagcagatgcagaactagacccccgccacagcagcctctgaagttggacagcaaaaccattgcttcactacccatcggtgtccatttatagaataatgtgggaagaaacaaacccgttttatgatttactcattatcgccttttgacagctgtgctgtaacacaagtagatgcctgaacttgaattaatccacacatcagtaatgtattctatctctctttacattttggtctctatactacattattaatgggttttgtgtactgtaaagaatttagctgtatcaaactagtgcatgaatagattctctcctgattatttatcacatagccccttagccagttgtatattattcttgtggtttgtgacccaattaagtcctactttacatatgctttaagaatcgatgggggatgcttcatgtgaacgtgggagttcagctgcttctcttgcctaagtattcctttcctgatcactatgcattttaaagttaaacatttttaagtatttcagatgctttagagagattttttttccatgactgcattttactgtacagattgctgcttctgctatatttgtgatataggaattaagaggatacacacgtttgtttcttcgtgcctgttttatgtgcacacattaggcattgagacttcaagcttttctttttttgtccacgtatctttgggtctttgataaagaaaagaatccctgttcattgtaagcacttttacggggcgggtggggaggggtgctctgctggtcttcaattaccaagaattctccaaaacaattttctgcaggatgattgtacagaatcattgcttatgacatgatcgctttctacactgtattacataaataaattaaataaaataaccccgggcaagacttttctttgaaggatgactacagacattaaataatcgaagtaattttgggtggggagaagaggcagattcaattttctttaaccagtctgaagtttcatttatgatacaaaagaagatgaaaatggaagtggcaatataaggggatgaggaaggcatgcctggacaaacccttcttttaagatgtgtcttcaatttgtataaaatggtgttttcatgtaaataaatacattcttggaggagcaccattgtgctggtgtgaatgattccatagtaacaatcttgaccatttactgacgtacagaccagtgagaagtcttcgcatgttgggtacccacacctgttgtgtcttaattgcaagtctgagtaggaagttggggccaacatgtgtctcccagtgctgggaaaatatttcatagacctaatttacagtctttacttgatctaaaacattttgctgccatattttggccctcaagtttgtcccaaatgagagacaaagggaaaagttccagggaaataaaaattaagacagctgattatctgtaaagcatggtttctcatcctgaacgctactaacattttgcagggaataattccttgttgaagggagttgtcctgaccagtgtaggatatttatttattttatttatgttttttgagagtctcgctctgtcacccaggctggagtgcagtggcacaatctcggctcactgcactccagcctgggagacagacgagactccgtctcaataaataaataaataaataaataaataaataaaaggagggcctggcacgaatgacatgcagggaaggcagtgagcaggtggaggtccctgtactcgttgtggtgccttatctaccaggcggttgagttgacgtctttgtggacagaattcgattacaaaggtgtccgaaagtctccaggtgggggagagttttgtagcgggcataatttgggttgtaaattgactgttgtctcctgagcagtctcctggtgagggagagtttcactggagctttgaaacacatgttagacagccttgccctgtagggagtgtctcgtgaaggagaggtaaacaattataattgcatttctaaagggctaagtaggacatgggaaactggaaaatggagaaaagaagagaaaaaaatagtaactcattctctttttcttagaaaaatgaggatacttggtcacatcctcacatggtgaagaataagatggtctcttcatttcccttcaacactagtcccatcgtgaggctctgccctcatgacctaatctaatcctaactgcctcccaaaggtcccacctccacatcccattattggggattagggtttcaacatagggatttgggggaaacacaaacactcagttcatagtgatatctgactgcgattccaaaggtctgaggacacattggccctgttgtttttgctgtgttgtccttggcctcaggtgaacattttagctttagattgcaacattttaagctaaaaacactaagctagaaaattaaacttatctcgtcacattctgcatggtgaacaaactcaaaactcacctgagtgtatcttgttttcatgagaaaaaatgaccggtcatctcccttgccctgttagggacagttagacatgactgctgtatgaagatatgtacatgttaacaattcatatgtacaagctactgttccattttgcctggcccaaggggaggtagctagctagttggggtagcagggcgaattaaccctaatataatagtacatttctaatgccaccaatgaaatgaaaaccagctctcaaacatggcactatatgggatggcattccaaggccaactcagttacagtaactacagctttaactttgatcattttgttaccagaaaggggtcccaatccagaccccaagacagggttcttggatctcatgcaagaaagaattcaaggcgggtccatagaggaaaaggaaatgaagttttaaagaaagtaggaaaataaagagtggttgctccataggcagagtgaacctaagggctgctggttgcccattttattgttatttcttaattatttactaaacaagggctgaattattcatgcctccccttggtagaccatatagggtaacttcctgatgttgccatggcatttgtaaaccgtcatggctctagtgggagtgtagcagtgaggacaaccagaggtcactctcattgctatcttggttttggtgggttttgaccggcttctttactgcaacttgttttatgagcaaggtctttatgacctgtatcttatgcagacctacaatctcatcctgtgacttagaatgacttaaccctctgggaatgcagcccagtaggtcccagccttattttacccagcccctattcaaaatggagttgctctggttcagacgcctctgacaattttaaagctaatgaaaaaaatgtctagccaaatgtatatatacatacatatataattatgaaaagataatgccttataatcttgattcttaaattgaggtatattgatagtattctcccaatggtctggggattaatcaataggtaatttatacaaaactgaagtgctgccaaatagaattataggagtagctgctgcgcaaaaaagattaatgagatttggggagactttgctgtggctaatatgatgggtcaggaagagtacaatctcagtacaattttaagttgtatttatcttatgaataattgggctattctttcatatgcccaagggccattttatagctctatatt

SEQ ID NO: 3 - DNA, 3543 bp, Homo sapiens
cgccgcgctcgggctccgtcagtttcctcggcagcggtaggcgagagcacgcggaggagcgtgcgcgggggccccgggagacggcggcggtggcggcgcgggcagagcaaggacgcggcggatcccactcgcacagcagcgcactcggtgccccgcgcagggtcgcgatgctgcccggtttggcactgctcctgctggccgcctggacggctcgggcgctggaggtacccactgatggtaatgctggcctgctggctgaaccccagattgccatgttctgtggcagactgaacatgcacatgaatgtccagaatgggaagtgggattcagatccatcagggaccaaaacctgcattgataccaaggaaggcatcctgcagtattgccaagaagtctaccctgaactgcagatcaccaatgtggtagaagccaaccaaccagtgaccatccagaactggtgcaagcggggccgcaagcagtgcaagacccatccccactttgtgattccctaccgctgcttagttggtgagtttgtaagtgatgcccttctcgttcctgacaagtgcaaattcttacaccaggagaggatggatgtttgcgaaactcatcttcactggcacaccgtcgccaaagagacatgcagtgagaagagtaccaacttgcatgactacggcatgttgctgccctgcggaattgacaagttccgaggggtagagtttgtgtgttgcccactggctgaagaaagtgacaatgtggattctgctgatgcggaggaggatgactcggatgtctggtggggcggagcagacacagactatgcagatgggagtgaagacaaagtagtagaagtagcagaggaggaagaagtggctgaggtggaagaagaagaagccgatgatgacgaggacgatgaggatggtgatgaggtagaggaagaggctgaggaaccctacgaagaagccacagagagaaccaccagcattgccaccaccaccaccaccaccacagagtctgtggaagaggtggttcgagaggtgtgctctgaacaagccgagacggggccgtgccgagcaatgatctcccgctggtactttgatgtgactgaagggaagtgtgccccattcttttacggcggatgtggcggcaaccggaacaactttgacacagaagagtactgcatggccgtgtgtggcagcgccattcctacaacagcagccagtacccctgatgccgttgacaagtatctcgagacacctggggatgagaatgaacatgcccatttccagaaagccaaagagaggcttgaggccaagcaccgagagagaatgtcccaggtcatgagagaatgggaagaggcagaacgtcaagcaaagaacttgcctaaagctgataagaaggcagttatccagcatttccaggagaaagtggaatctttggaacaggaagcagccaacgagagacagcagctggtggagacacacatggccagagtggaagccatgctcaatgaccgccgccgcctggccctggagaactacatcaccgctctgcaggctgttcctcctcggcctcgtcacgtgttcaatatgctaaagaagtatgtccgcgcagaacagaaggacagacagcacaccctaaagcatttcgagcatgtgcgcatggtggatcccaagaaagccgctcagatccggtcccaggttatgacacacctccgtgtgatttatgagcgcatgaatcagtctctctccctgctctacaacgtgcctgcagtggccgaggagattcaggatgaagttgatgagctgcttcagaaagagcaaaactattcagatgacgtcttggccaacatgattagtgaaccaaggatcagttacggaaacgatgctctcatgccatctttgaccgaaacgaaaaccaccgtggagctccttcccgtgaatggagagttcagcctggacgatctccagccgtggcattcttttggggctgactctgtgccagccaacacagaaaacgaagttgagcctgttgatgcccgccctgctgccgaccgaggactgaccactcgaccaggttctgggttgacaaatatcaagacggaggagatctctgaagtgaagatggatgcagaattccgacatgactcaggatatgaagttcatcatcaaaaattggtgttctttgcagaagatgtgggttcaaacaaaggtgcaatcattggactcatggtgggcggtgttgtcatagcgacagtgatcgtcatcaccttggtgatgctgaagaagaaacagtacacatccattcatcatggtgtggtggaggttgacgccgctgtcaccccagaggagcgccacctgtccaagatgcagcagaacggctacgaaaatccaacctacaagttctttgagcagatgcagaactagacccccgccacagcagcctctgaagttggacagcaaaaccattgcttcactacccatcggtgtccatttatagaataatgtgggaagaaacaaacccgttttatgatttactcattatcgccttttgacagctgtgctgtaacacaagtagatgcctgaacttgaattaatccacacatcagtaatgtattctatctctctttacattttggtctctatactacattattaatgggttttgtgtactgtaaagaatttagctgtatcaaactagtgcatgaatagattctctcctgattatttatcacatagccccttagccagttgtatattattcttgtggtttgtgacccaattaagtcctactttacatatgctttaagaatcgatgggggatgcttcatgtgaacgtgggagttcagctgcttctcttgcctaagtattcctttcctgatcactatgcattttaaagttaaacatttttaagtatttcagatgctttagagagattttttttccatgactgcattttactgtacagattgctgcttctgctatatttgtgatataggaattaagaggatacacacgtttgtttcttcgtgcctgttttatgtgcacacattaggcattgagacttcaagcttttctttttttgtccacgtatctttgggtctttgataaagaaaagaatccctgttcattgtaagcacttttacggggcgggtggggaggggtgctctgctggtcttcaattaccaagaattctccaaaacaattttctgcaggatgattgtacagaatcattgcttatgacatgatcgctttctacactgtattacataaataaattaaataaaataaccccgggcaagacttttctttgaaggatgactacagacattaaataatcgaagtaattttgggtggggagaagaggcagattcaattttctttaaccagtctgaagtttcatttatgatacaaaagaagatgaaaatggaagtggcaatataaggggatgaggaaggcatgcctggacaaacccttcttttaagatgtgtcttcaatttgtataaaatggtgttttcatgtaaataaatacattcttggaggagca

SEQ ID NO: 4 - DNA, 3355 bp, Homo sapiens
agtttcctcggcagcggtaggcgagagcacgcggaggagcgtgcgcgggggccccgggagacggcggcggtggcggcgcgggcagagcaaggacgcggcggatcccactcgcacagcagcgcactcggtgccccgcgcagggtcgcgatgctgcccggtttggcactgctcctgctggccgcctggacggctcgggcgctggaggtacccactgatggtaatgctggcctgctggctgaaccccagattgccatgttctgtggcagactgaacatgcacatgaatgtccagaatgggaagtgggattcagatccatcagggaccaaaacctgcattgataccaaggaaggcatcctgcagtattgccaagaagtctaccctgaactgcagatcaccaatgtggtagaagccaaccaaccagtgaccatccagaactggtgcaagcggggccgcaagcagtgcaagacccatccccactttgtgattccctaccgctgcttagttggtgagtttgtaagtgatgcccttctcgttcctgacaagtgcaaattcttacaccaggagaggatggatgtttgcgaaactcatcttcactggcacaccgtcgccaaagagacatgcagtgagaagagtaccaacttgcatgactacggcatgttgctgccctgcggaattgacaagttccgaggggtagagtttgtgtgttgcccactggctgaagaaagtgacaatgtggattctgctgatgcggaggaggatgactcggatgtctggtggggcggagcagacacagactatgcagatgggagtgaagacaaagtagtagaagtagcagaggaggaagaagtggctgaggtggaagaagaagaagccgatgatgacgaggacgatgaggatggtgatgaggtagaggaagaggctgaggaaccctacgaagaagccacagagagaaccaccagcattgccaccaccaccaccaccaccacagagtctgtggaagaggtggttcgagttcctacaacagcagccagtacccctgatgccgttgacaagtatctcgagacacctggggatgagaatgaacatgcccatttccagaaagccaaagagaggcttgaggccaagcaccgagagagaatgtcccaggtcatgagagaatgggaagaggcagaacgtcaagcaaagaacttgcctaaagctgataagaaggcagttatccagcatttccaggagaaagtggaatctttggaacaggaagcagccaacgagagacagcagctggtggagacacacatggccagagtggaagccatgctcaatgaccgccgccgcctggccctggagaactacatcaccgctctgcaggctgttcctcctcggcctcgtcacgtgttcaatatgctaaagaagtatgtccgcgcagaacagaaggacagacagcacaccctaaagcatttcgagcatgtgcgcatggtggatcccaagaaagccgctcagatccggtcccaggttatgacacacctccgtgtgatttatgagcgcatgaatcagtctctctccctgctctacaacgtgcctgcagtggccgaggagattcaggatgaagttgatgagctgcttcagaaagagcaaaactattcagatgacgtcttggccaacatgattagtgaaccaaggatcagttacggaaacgatgctctcatgccatctttgaccgaaacgaaaaccaccgtggagctccttcccgtgaatggagagttcagcctggacgatctccagccgtggcattcttttggggctgactctgtgccagccaacacagaaaacgaagttgagcctgttgatgcccgccctgctgccgaccgaggactgaccactcgaccaggttctgggttgacaaatatcaagacggaggagatctctgaagtgaagatggatgcagaattccgacatgactcaggatatgaagttcatcatcaaaaattggtgttctttgcagaagatgtgggttcaaacaaaggtgcaatcattggactcatggtgggcggtgttgtcatagcgacagtgatcgtcatcaccttggtgatgctgaagaagaaacagtacacatccattcatcatggtgtggtggaggttgacgccgctgtcaccccagaggagcgccacctgtccaagatgcagcagaacggctacgaaaatccaacctacaagttctttgagcagatgcagaactagacccccgccacagcagcctctgaagttggacagcaaaaccattgcttcactacccatcggtgtccatttatagaataatgtgggaagaaacaaacccgttttatgatttactcattatcgccttttgacagctgtgctgtaacacaagtagatgcctgaacttgaattaatccacacatcagtaatgtattctatctctctttacattttggtctctatactacattattaatgggttttgtgtactgtaaagaatttagctgtatcaaactagtgcatgaatagattctctcctgattatttatcacatagccccttagccagttgtatattattcttgtggtttgtgacccaattaagtcctactttacatatgctttaagaatcgatgggggatgcttcatgtgaacgtgggagttcagctgcttctcttgcctaagtattcctttcctgatcactatgcattttaaagttaaacatttttaagtatttcagatgctttagagagattttttttccatgactgcattttactgtacagattgctgcttctgctatatttgtgatataggaattaagaggatacacacgtttgtttcttcgtgcctgttttatgtgcacacattaggcattgagacttcaagcttttctttttttgtccacgtatctttgggtctttgataaagaaaagaatccctgttcattgtaagcacttttacggggcgggtggggaggggtgctctgctggtcttcaattaccaagaattctccaaaacaattttctgcaggatgattgtacagaatcattgcttatgacatgatcgctttctacactgtattacataaataaattaaataaaataaccccgggcaagacttttctttgaaggatgactacagacattaaataatcgaagtaattttgggtggggagaagaggcagattcaattttctttaaccagtctgaagtttcatttatgatacaaaagaagatgaaaatggaagtggcaatataaggggatgaggaaggcatgcctggacaaacccttcttttaagatgtgtcttcaatttgtataaaatggtgttttcatgtaaataaatacattcttggaggagca

SEQ ID NO: 5 - DNA, 2846 bp, Homo sapiens
agagttccggaggctttggttgtccattgttagcttagaagttggcgcagtgtgcgtgtgatccacgcctaaatagcacagccttgctgtgcgtggtagaagttgggttagtgttgacatgctgttgactcaccctcccgaggatggaagctctggcctgggtcaagttgtggtcactgcagttaacagtttgttgatctcagggagtattccacagttgctgatgtaattgacaatgattggagccagctcttccccagattcaaatggaccaattagaggacttgttggttctgtttatcaactatgtacccactgatggtaatgctggcctgctggctgaaccccagattgccatgttctgtggcagactgaacatgcacatgaatgtccagaatgggaagtgggattcagatccatcagggaccaaaacctgcattgataccaaggaaggcatcctgcagtattgccaagaagtctaccctgaactgcagatcaccaatgtggtagaagccaaccaaccagtgaccatccagaactggtgcaagcggggccgcaagcagtgcaagacccatccccactttgtgattccctaccgctgcttagttggtgagtttgtaagtgatgcccttctcgttcctgacaagtgcaaattcttacaccaggagaggatggatgtttgcgaaactcatcttcactggcacaccgtcgccaaagagacatgcagtgagaagagtaccaacttgcatgactacggcatgttgctgccctgcggaattgacaagttccgaggggtagagtttgtgtgttgcccactggctgaagaaagtgacaatgtggattctgctgatgcggaggaggatgactcggatgtctggtggggcggagcagacacagactatgcagatgggagtgaagacaaagtagtagaagtagcagaggaggaagaagtggctgaggtggaagaagaagaagccgatgatgacgaggacgatgaggatggtgatgaggtagaggaagaggctgaggaaccctacgaagaagccacagagagaaccaccagcattgccaccaccaccaccaccaccacagagtctgtggaagaggtggttcgagaggtgtgctctgaacaagccgagacggggccgtgccgagcaatgatctcccgctggtactttgatgtgactgaagggaagtgtgccccattcttttacggcggatgtggcggcaaccggaacaactttgacacagaagagtactgcatggccgtgtgtggcagcgccattcctacaacagcagccagtacccctgatgccgttgacaagtatctcgagacacctggggatgagaatgaacatgcccatttccagaaagccaaagagaggcttgaggccaagcaccgagagagaatgtcccaggtcatgagagaatgggaagaggcagaacgtcaagcaaagaacttgcctaaagctgataagaaggcagttatccagcatttccaggagaaagtggaatctttggaacaggaagcagccaacgagagacagcagctggtggagacacacatggccagagtggaagccatgctcaatgaccgccgccgcctggccctggagaactacatcaccgctctgcaggctgttcctcctcggcctcgtcacgtgttcaatatgctaaagaagtatgtccgcgcagaacagaaggacagacagcacaccctaaagcatttcgagcatgtgcgcatggtggatcccaagaaagccgctcagatccggtcccaggttatgacacacctccgtgtgatttatgagcgcatgaatcagtctctctccctgctctacaacgtgcctgcagtggccgaggagattcaggatgaagttgatgagctgcttcagaaagagcaaaactattcagatgacgtcttggccaacatgattagtgaaccaaggatcagttacggaaacgatgctctcatgccatctttgaccgaaacgaaaaccaccgtggagctccttcccgtgaatggagagttcagcctggacgatctccagccgtggcattcttttggggctgactctgtgccagccaacacagaaaacgaagttgagcctgttgatgcccgccctgctgccgaccgaggactgaccactcgaccaggttctgggttgacaaatatcaagacggaggagatctctgaagtgaagatggatgcagaattccgacatgactcaggatatgaagttcatcatcaaaaattggtgttctttgcagaagatgtgggttcaaacaaaggtgcaatcattggactcatggtgggcggtgttgtcatagcgacagtgatcgtcatcaccttggtgatgctgaagaagaaacagtacacatccattcatcatggtgtggtggaggttgacgccgctgtcaccccagaggagcgccacctgtccaagatgcagcagaacggctacgaaaatccaacctacaagttctttgagcagatgcagaactagacccccgccacagcagcctctgaagttggacagcaaaaccattgcttcactacccatcggtgtccatttatagaataatgtgggaagaaacaaacccgttttatgatttactcattatcgccttttgacagctgtgctgtaacacaagtagatgcctgaacttgaattaatccacacatcagtaatgtattctatctctctttacattttggtctctatactacattattaatgggttttgtgtactgtaaagaatttagctgtatcaaactagtgcatgaatagattctctcctgattatttatcacatagccccttagccagttgtatattattctt

SEQ ID NO: 6 - DNA, 3167 bp, Homo sapiens
gcgagagcacgcggaggagcgtgcgcgggggccccgggagacggcggcggtggcggcgcgggcagagcaaggacgcggcggatcccactcgcacagcagcgcactcggtgccccgcgcagggtcgcgatgctgcccggtttggcactgctcctgctggccgcctggacggctcgggcgctggaggtctaccctgaactgcagatcaccaatgtggtagaagccaaccaaccagtgaccatccagaactggtgcaagcggggccgcaagcagtgcaagacccatccccactttgtgattccctaccgctgcttagttggtgagtttgtaagtgatgcccttctcgttcctgacaagtgcaaattcttacaccaggagaggatggatgtttgcgaaactcatcttcactggcacaccgtcgccaaagagacatgcagtgagaagagtaccaacttgcatgactacggcatgttgctgccctgcggaattgacaagttccgaggggtagagtttgtgtgttgcccactggctgaagaaagtgacaatgtggattctgctgatgcggaggaggatgactcggatgtctggtggggcggagcagacacagactatgcagatgggagtgaagacaaagtagtagaagtagcagaggaggaagaagtggctgaggtggaagaagaagaagccgatgatgacgaggacgatgaggatggtgatgaggtagaggaagaggctgaggaaccctacgaagaagccacagagagaaccaccagcattgccaccaccaccaccaccaccacagagtctgtggaagaggtggttcgagttcctacaacagcagccagtacccctgatgccgttgacaagtatctcgagacacctggggatgagaatgaacatgcccatttccagaaagccaaagagaggcttgaggccaagcaccgagagagaatgtcccaggtcatgagagaatgggaagaggcagaacgtcaagcaaagaacttgcctaaagctgataagaaggcagttatccagcatttccaggagaaagtggaatctttggaacaggaagcagccaacgagagacagcagctggtggagacacacatggccagagtggaagccatgctcaatgaccgccgccgcctggccctggagaactacatcaccgctctgcaggctgttcctcctcggcctcgtcacgtgttcaatatgctaaagaagtatgtccgcgcagaacagaaggacagacagcacaccctaaagcatttcgagcatgtgcgcatggtggatcccaagaaagccgctcagatccggtcccaggttatgacacacctccgtgtgatttatgagcgcatgaatcagtctctctccctgctctacaacgtgcctgcagtggccgaggagattcaggatgaagttgatgagctgcttcagaaagagcaaaactattcagatgacgtcttggccaacatgattagtgaaccaaggatcagttacggaaacgatgctctcatgccatctttgaccgaaacgaaaaccaccgtggagctccttcccgtgaatggagagttcagcctggacgatctccagccgtggcattcttttggggctgactctgtgccagccaacacagaaaacgaagttgagcctgttgatgcccgccctgctgccgaccgaggactgaccactcgaccaggttctgggttgacaaatatcaagacggaggagatctctgaagtgaagatggatgcagaattccgacatgactcaggatatgaagttcatcatcaaaaattggtgttctttgcagaagatgtgggttcaaacaaaggtgcaatcattggactcatggtgggcggtgttgtcatagcgacagtgatcgtcatcaccttggtgatgctgaagaagaaacagtacacatccattcatcatggtgtggtggaggttgacgccgctgtcaccccagaggagcgccacctgtccaagatgcagcagaacggctacgaaaatccaacctacaagttctttgagcagatgcagaactagacccccgccacagcagcctctgaagttggacagcaaaaccattgcttcactacccatcggtgtccatttatagaataatgtgggaagaaacaaacccgttttatgatttactcattatcgccttttgacagctgtgctgtaacacaagtagatgcctgaacttgaattaatccacacatcagtaatgtattctatctctctttacattttggtctctatactacattattaatgggttttgtgtactgtaaagaatttagctgtatcaaactagtgcatgaatagattctctcctgattatttatcacatagccccttagccagttgtatattattcttgtggtttgtgacccaattaagtcctactttacatatgctttaagaatcgatgggggatgcttcatgtgaacgtgggagttcagctgcttctcttgcctaagtattcctttcctgatcactatgcattttaaagttaaacatttttaagtatttcagatgctttagagagattttttttccatgactgcattttactgtacagattgctgcttctgctatatttgtgatataggaattaagaggatacacacgtttgtttcttcgtgcctgttttatgtgcacacattaggcattgagacttcaagcttttctttttttgtccacgtatctttgggtctttgataaagaaaagaatccctgttcattgtaagcacttttacggggcgggtggggaggggtgctctgctggtcttcaattaccaagaattctccaaaacaattttctgcaggatgattgtacagaatcattgcttatgacatgatcgctttctacactgtattacataaataaattaaataaaataaccccgggcaagacttttctttgaaggatgactacagacattaaataatcgaagtaattttgggtggggagaagaggcagattcaattttctttaaccagtctgaagtttcatttatgatacaaaagaagatgaaaatggaagtggcaatataaggggatgaggaaggcatgcctggacaaacccttcttttaagatgtgtcttcaatttgtataaaatggtgttttcatgtaaataaatacattcttggaggagca

SEQ ID NO: 7 - DNA, 2366 bp, Homo sapiens
gatcccactcgcacagcagcgcactcggtgccccgcgcagggtcgcgatgctgcccggtttggcactgctcctgctggccgcctggacggctcgggcgctggaggtacccactgatggtaatgctggcctgctggctgaaccccagattgccatgttctgtggcagactgaacatgcacatgaatgtccagaatgggaagtgggattcagatccatcagggaccaaaacctgcattgataccaaggaaggcatcctgcagtattgccaagaagtctaccctgaactgcagatcaccaatgtggtagaagccaaccaaccagtgaccatccagaactggtgcaagcggggccgcaagcagtgcaagacccatccccactttgtgattccctaccgctgcttagttggtgagtttgtaagtgatgcccttctcgttcctgacaagtgcaaattcttacaccaggagaggatggatgtttgcgaaactcatcttcactggcacaccgtcgccaaagagacatgcagtgagaagagtaccaacttgcatgactacggcatgttgctgccctgcggaattgacaagttccgaggggtagagtttgtgtgttgcccactggctgaagaaagtgacaatgtggattctgctgatgcggaggaggatgactcggatgtctggtggggcggagcagacacagactatgcagatgggagtgaagacaaagtagtagaagtagcagaggaggaagaagtggctgaggtggaagaagaagaagccgatgatgacgaggacgatgaggatggtgatgaggtagaggaagaggctgaggaaccctacgaagaagccacagagagaaccaccagcattgccaccaccaccaccaccaccacagagtctgtggaagaggtggttcgagaggtgtgctctgaacaagccgagacggggccgtgccgagcaatgatctcccgctggtactttgatgtgactgaagggaagtgtgccccattcttttacggcggatgtggcggcaaccggaacaactttgacacagaagagtactgcatggccgtgtgtggcagcgccatgtcccaaagtttactcaagactacccaggaacctcttgcccgagatcctgttaaacttcctacaacagcagccagtacccctgatgccgttgacaagtatctcgagacacctggggatgagaatgaacatgcccatttccagaaagccaaagagaggcttgaggccaagcaccgagagagaatgtcccaggtcatgagagaatgggaagaggcagaacgtcaagcaaagaacttgcctaaagctgataagaaggcagttatccagcatttccaggagaaagtggaatctttggaacaggaagcagccaacgagagacagcagctggtggagacacacatggccagagtggaagccatgctcaatgaccgccgccgcctggccctggagaactacatcaccgctctgcaggctgttcctcctcggcctcgtcacgtgttcaatatgctaaagaagtatgtccgcgcagaacagaaggacagacagcacaccctaaagcatttcgagcatgtgcgcatggtggatcccaagaaagccgctcagatccggtcccaggttatgacacacctccgtgtgatttatgagcgcatgaatcagtctctctccctgctctacaacgtgcctgcagtggccgaggagattcaggatgaagttgatgagctgcttcagaaagagcaaaactattcagatgacgtcttggccaacatgattagtgaaccaaggatcagttacggaaacgatgctctcatgccatctttgaccgaaacgaaaaccaccgtggagctccttcccgtgaatggagagttcagcctggacgatctccagccgtggcattcttttggggctgactctgtgccagccaacacagaaaacgaaggttctgggttgacaaatatcaagacggaggagatctctgaagtgaagatggatgcagaattccgacatgactcaggatatgaagttcatcatcaaaaattggtgttctttgcagaagatgtgggttcaaacaaaggtgcaatcattggactcatggtgggcggtgttgtcatagcgacagtgatcgtcatcaccttggtgatgctgaagaagaaacagtacacatccattcatcatggtgtggtggaggttgacgccgctgtcaccccagaggagcgccacctgtccaagatgcagcagaacggctacgaaaatccaacctacaagttctttgagcagatgcagaactagacccccgccacagcagcctctgaagttggacagcaaaaccattgcttcactacccatcgg

SEQ ID NO: 8-11 - skipped (4 entries)

SEQ ID NO: 12 - DNA, 18 bp, Artificial sequence
  Synthetic oligonucleotide
caatgcaggttttggtcc

SEQ ID NO: 13 - DNA, 18 bp, Artificial sequence
  Synthetic oligonucleotide
ccagttctggatggtcac

SEQ ID NO: 14 - DNA, 18 bp, Artificial sequence
  Synthetic oligonucleotide
ggccccgcttgcaccagt

SEQ ID NO: 15 - DNA, 18 bp, Artificial sequence
  Synthetic oligonucleotide
cactgcttgcggccccgc

SEQ ID NO: 16 - DNA, 18 bp, Artificial sequence
  Synthetic oligonucleotide
atgtctctttggcgacgg

SEQ ID NO: 17 - DNA, 18 bp, Artificial sequence
  Synthetic oligonucleotide
atgacctgggacattctc

SEQ ID NO: 18 - DNA, 18 bp, Artificial sequence
  Synthetic oligonucleotide
cccattctctcatgacct

SEQ ID NO: 19 - DNA, 18 bp, Artificial sequence
  Synthetic oligonucleotide
tagggtgtgctgtctgtc

SEQ ID NO: 20 - DNA, 18 bp, Artificial sequence
  Synthetic oligonucleotide
cacgggaaggagctccac

SEQ ID NO: 21 - DNA, 18 bp, Artificial sequence
  Synthetic oligonucleotide
gtgccaaaccgggcagca

SEQ ID NO: 22 - DNA, 18 bp, Artificial sequence
  Synthetic oligonucleotide
gccgtccaggcggccagc

SEQ ID NO: 23 - DNA, 18 bp, Artificial sequence
  Synthetic oligonucleotide
agtgggtacctccagcgc

SEQ ID NO: 24 - DNA, 18 bp, Artificial sequence
  Synthetic oligonucleotide
gccagcattaccatcagt

SEQ ID NO: 25 - DNA, 18 bp, Artificial sequence
  Synthetic oligonucleotide
gatgccttccttggtatc

SEQ ID NO: 26 - DNA, 18 bp, Artificial sequence
  Synthetic oligonucleotide
agacttcttggcaatact

SEQ ID NO: 27 - DNA, 18 bp, Artificial sequence
  Synthetic oligonucleotide
ctgcagttcagggtagac

SEQ ID NO: 28 - DNA, 18 bp, Artificial sequence
  Synthetic oligonucleotide
tggttggcttctaccaca

SEQ ID NO: 29 - DNA, 18 bp, Artificial sequence
  Synthetic oligonucleotide
ggtcactggttggttggc

SEQ ID NO: 30 - DNA, 18 bp, Artificial sequence
  Synthetic oligonucleotide
atgggtcttgcactgctt

SEQ ID NO: 31 - DNA, 18 bp, Artificial sequence
  Synthetic oligonucleotide
aagcagcggtagggaatc

SEQ ID NO: 32 - DNA, 18 bp, Artificial sequence
  Synthetic oligonucleotide
tcaccaactaagcagcgg

SEQ ID NO: 33 - DNA, 18 bp, Artificial sequence
  Synthetic oligonucleotide
gaatttgcacttgtcagg

SEQ ID NO: 34 - DNA, 18 bp, Artificial sequence
  Synthetic oligonucleotide
tcgcaaacatccatcctc

SEQ ID NO: 35 - DNA, 18 bp, Artificial sequence
  Synthetic oligonucleotide
cagtgaagatgagtttcg

SEQ ID NO: 36 - DNA, 18 bp, Artificial sequence
  Synthetic oligonucleotide
catgcaagttggtactct

SEQ ID NO: 37 - DNA, 18 bp, Artificial sequence
  Synthetic oligonucleotide
cagcaacatgccgtagtc

SEQ ID NO: 38 - DNA, 18 bp, Artificial sequence
  Synthetic oligonucleotide
tgtcaattccgcagggca

SEQ ID NO: 39 - DNA, 18 bp, Artificial sequence
  Synthetic oligonucleotide
tacccctcggaacttgtc

SEQ ID NO: 40 - DNA, 18 bp, Artificial sequence
  Synthetic oligonucleotide
tcagccagtgggcaacac

SEQ ID NO: 41 - DNA, 18 bp, Artificial sequence
  Synthetic oligonucleotide
atccgagtcatcctcctc

SEQ ID NO: 42 - DNA, 18 bp, Artificial sequence
  Synthetic oligonucleotide
ctccgccccaccagacat

SEQ ID NO: 43 - DNA, 18 bp, Artificial sequence
  Synthetic oligonucleotide
atctgcatagtctgtgtc

SEQ ID NO: 44 - DNA, 18 bp, Artificial sequence
  Synthetic oligonucleotide
gtcatcatcggcttcttc

SEQ ID NO: 45 - DNA, 18 bp, Artificial sequence
  Synthetic oligonucleotide
ggtactggctgctgttgt

SEQ ID NO: 46 - DNA, 18 bp, Artificial sequence
  Synthetic oligonucleotide
gtctcgagatacttgtca

SEQ ID NO: 47 - DNA, 18 bp, Artificial sequence
  Synthetic oligonucleotide
tgggcatgttcattctca

SEQ ID NO: 48 - DNA, 18 bp, Artificial sequence
  Synthetic oligonucleotide
ttctctctcggtgcttgg

SEQ ID NO: 49 - DNA, 18 bp, Artificial sequence
  Synthetic oligonucleotide
gcggtgatgtagttctcc

SEQ ID NO: 50 - DNA, 18 bp, Artificial sequence
  Synthetic oligonucleotide
gccgaggaggaacagcct

SEQ ID NO: 51 - DNA, 18 bp, Artificial sequence
  Synthetic oligonucleotide
ttctgcgcggacatactt

SEQ ID NO: 52 - DNA, 18 bp, Artificial sequence
  Synthetic oligonucleotide
cgcacatgctcgaaatgc

SEQ ID NO: 53 - DNA, 18 bp, Artificial sequence
  Synthetic oligonucleotide
gatccaccatgcgcacat

SEQ ID NO: 54 - DNA, 18 bp, Artificial sequence
  Synthetic oligonucleotide
ggctttcttgggatccac

SEQ ID NO: 55 - DNA, 18 bp, Artificial sequence
  Synthetic oligonucleotide
ccggatctgagcggcttt

SEQ ID NO: 56 - DNA, 18 bp, Artificial sequence
  Synthetic oligonucleotide
cctgggaccggatctgag

SEQ ID NO: 57 - DNA, 18 bp, Artificial sequence
  Synthetic oligonucleotide
aaatcacacggaggtgtg

SEQ ID NO: 58 - DNA, 18 bp, Artificial sequence
  Synthetic oligonucleotide
gactgattcatgcgctca

SEQ ID NO: 59 - DNA, 18 bp, Artificial sequence
  Synthetic oligonucleotide
tcactaatcatgttggcc

SEQ ID NO: 60 - DNA, 18 bp, Artificial sequence
  Synthetic oligonucleotide
gtaactgatccttggttc

SEQ ID NO: 61 - DNA, 18 bp, Artificial sequence
  Synthetic oligonucleotide
gtttcggtcaaagatggc

SEQ ID NO: 62 - DNA, 18 bp, Artificial sequence
  Synthetic oligonucleotide
tgccacggctggagatcg

SEQ ID NO: 63 - DNA, 18 bp, Artificial sequence
  Synthetic oligonucleotide
ggcgggcatcaacaggct

SEQ ID NO: 64 - DNA, 18 bp, Artificial sequence
  Synthetic oligonucleotide
ggtcagtcctcggtcggc

SEQ ID NO: 65 - DNA, 18 bp, Artificial sequence
  Synthetic oligonucleotide
tggtcgagtggtcagtcc

SEQ ID NO: 66 - DNA, 18 bp, Artificial sequence
  Synthetic oligonucleotide
cccagaacctggtcgagt

SEQ ID NO: 67 - DNA, 18 bp, Artificial sequence
  Synthetic oligonucleotide
gagatctcctccgtcttg

SEQ ID NO: 68 - DNA, 18 bp, Artificial sequence
  Synthetic oligonucleotide
gagtcatgtcggaattct

SEQ ID NO: 69 - DNA, 18 bp, Artificial sequence
  Synthetic oligonucleotide
gatgaacttcatatcctg

SEQ ID NO: 70 - DNA, 18 bp, Artificial sequence
  Synthetic oligonucleotide
ccaatgattgcacctttg

SEQ ID NO: 71 - DNA, 18 bp, Artificial sequence
  Synthetic oligonucleotide
gcccaccatgagtccaat

SEQ ID NO: 72 - DNA, 18 bp, Artificial sequence
  Synthetic oligonucleotide
tatgacaacaccgcccac

SEQ ID NO: 73 - DNA, 18 bp, Artificial sequence
  Synthetic oligonucleotide
gtgatgacgatcactgtc

SEQ ID NO: 74 - DNA, 18 bp, Artificial sequence
  Synthetic oligonucleotide
agccgttctgctgcatct

SEQ ID NO: 75 - DNA, 18 bp, Artificial sequence
  Synthetic oligonucleotide
cctctcgaaccacctctt

SEQ ID NO: 76 - DNA, 18 bp, Artificial sequence
  Synthetic oligonucleotide
gttcagagcacacctctc

SEQ ID NO: 77 - DNA, 18 bp, Artificial sequence
  Synthetic oligonucleotide
cccgtctcggcttgttca

SEQ ID NO: 78 - DNA, 18 bp, Artificial sequence
  Synthetic oligonucleotide
tcggcacggccccgtctc

SEQ ID NO: 79 - DNA, 18 bp, Artificial sequence
  Synthetic oligonucleotide
cgggagatcattgctcgg

SEQ ID NO: 80 - DNA, 18 bp, Artificial sequence
  Synthetic oligonucleotide
tcaaagtaccagcgggag

SEQ ID NO: 81 - DNA, 18 bp, Artificial sequence
  Synthetic oligonucleotide
acatccgccgtaaaagaa

SEQ ID NO: 82 - DNA, 18 bp, Artificial sequence
  Synthetic oligonucleotide
gtgtcaaagttgttccgg

SEQ ID NO: 83 - DNA, 18 bp, Artificial sequence
  Synthetic oligonucleotide
acacggccatgcagtact

SEQ ID NO: 84 - DNA, 18 bp, Artificial sequence
  Synthetic oligonucleotide
ttgagtaaactttgggac

SEQ ID NO: 85 - DNA, 18 bp, Artificial sequence
  Synthetic oligonucleotide
tcgggcaagaggttcctg

SEQ ID NO: 86 - DNA, 18 bp, Artificial sequence
  Synthetic oligonucleotide
acaggatctcgggcaaga

SEQ ID NO: 87 - DNA, 18 bp, Artificial sequence
  Synthetic oligonucleotide
acaagtcctctaattggt

SEQ ID NO: 88 - DNA, 18 bp, Artificial sequence
  Synthetic oligonucleotide
gcaccagttctggatggt

SEQ ID NO: 89 - DNA, 18 bp, Artificial sequence
  Synthetic oligonucleotide
gcggccccgcttgcacca

SEQ ID NO: 90 - DNA, 18 bp, Artificial sequence
  Synthetic oligonucleotide
gcatgtctctttggcgac

SEQ ID NO: 91 - DNA, 18 bp, Artificial sequence
  Synthetic oligonucleotide
catcaaagtaccagcggg

SEQ ID NO: 92 - DNA, 18 bp, Artificial sequence
  Synthetic oligonucleotide
tcatgacctgggacattc

SEQ ID NO: 93 - DNA, 18 bp, Artificial sequence
  Synthetic oligonucleotide
cagtgccaaaccgggcag

SEQ ID NO: 94 - DNA, 18 bp, Artificial sequence
  Synthetic oligonucleotide
gagccgtccaggcggcca

SEQ ID NO: 95 - DNA, 18 bp, Artificial sequence
  Synthetic oligonucleotide
cagtgggtacctccagcg

SEQ ID NO: 96 - DNA, 18 bp, Artificial sequence
  Synthetic oligonucleotide
ggttcagccagcaggcca

SEQ ID NO: 97 - DNA, 18 bp, Artificial sequence
  Synthetic oligonucleotide
ggtatcaatgcaggtttt

SEQ ID NO: 98 - DNA, 18 bp, Artificial sequence
  Synthetic oligonucleotide
ggatgccttccttggtat

SEQ ID NO: 99 - DNA, 18 bp, Artificial sequence
  Synthetic oligonucleotide
gggtagacttcttggcaa

SEQ ID NO: 100 - DNA, 18 bp, Artificial sequence
  Synthetic oligonucleotide
gtgatctgcagttcaggg

SEQ ID NO: 101 - DNA, 18 bp, Artificial sequence
  Synthetic oligonucleotide
gttggttggcttctacca

SEQ ID NO: 102 - DNA, 18 bp, Artificial sequence
  Synthetic oligonucleotide
ggatggtcactggttggt

SEQ ID NO: 103 - DNA, 18 bp, Artificial sequence
  Synthetic oligonucleotide
gcactgcttgcggccccg

SEQ ID NO: 104 - DNA, 18 bp, Artificial sequence
  Synthetic oligonucleotide
ggatgggtcttgcactgc

SEQ ID NO: 105 - DNA, 18 bp, Artificial sequence
  Synthetic oligonucleotide
ctaagcagcggtagggaa

SEQ ID NO: 106 - DNA, 18 bp, Artificial sequence
  Synthetic oligonucleotide
actcaccaactaagcagc

SEQ ID NO: 107 - DNA, 18 bp, Artificial sequence
  Synthetic oligonucleotide
ggtgtaagaatttgcact

SEQ ID NO: 108 - DNA, 18 bp, Artificial sequence
  Synthetic oligonucleotide
tttcgcaaacatccatcc

SEQ ID NO: 109 - DNA, 18 bp, Artificial sequence
  Synthetic oligonucleotide
ggtgtgccagtgaagatg

SEQ ID NO: 110 - DNA, 18 bp, Artificial sequence
  Synthetic oligonucleotide
gccgtagtcatgcaagtt

SEQ ID NO: 111 - DNA, 18 bp, Artificial sequence
  Synthetic oligonucleotide
cgcagggcagcaacatgc

SEQ ID NO: 112 - DNA, 18 bp, Artificial sequence
  Synthetic oligonucleotide
cttgtcaattccgcaggg

SEQ ID NO: 113 - DNA, 18 bp, Artificial sequence
  Synthetic oligonucleotide
ctacccctcggaacttgt

SEQ ID NO: 114 - DNA, 18 bp, Artificial sequence
  Synthetic oligonucleotide
ccgcatcagcagaatcca

SEQ ID NO: 115 - DNA, 18 bp, Artificial sequence
  Synthetic oligonucleotide
catccgagtcatcctcct

SEQ ID NO: 116 - DNA, 18 bp, Artificial sequence
  Synthetic oligonucleotide
ctgctccgccccaccaga

SEQ ID NO: 117 - DNA, 18 bp, Artificial sequence
  Synthetic oligonucleotide
ccatctgcatagtctgtg

SEQ ID NO: 118 - DNA, 18 bp, Artificial sequence
  Synthetic oligonucleotide
cgtagggttcctcagcct

SEQ ID NO: 119 - DNA, 18 bp, Artificial sequence
  Synthetic oligonucleotide
gggtactggctgctgttg

SEQ ID NO: 120 - DNA, 18 bp, Artificial sequence
  Synthetic oligonucleotide
ggtgtctcgagatacttg

SEQ ID NO: 121 - DNA, 18 bp, Artificial sequence
  Synthetic oligonucleotide
ggtgcttggcctcaagcc

SEQ ID NO: 122 - DNA, 18 bp, Artificial sequence
  Synthetic oligonucleotide
cattctctctcggtgctt

SEQ ID NO: 123 - DNA, 18 bp, Artificial sequence
  Synthetic oligonucleotide
gagcggtgatgtagttct

SEQ ID NO: 124 - DNA, 18 bp, Artificial sequence
  Synthetic oligonucleotide
cgtgacgaggccgaggag

SEQ ID NO: 125 - DNA, 18 bp, Artificial sequence
  Synthetic oligonucleotide
gttctgcgcggacatact

SEQ ID NO: 126 - DNA, 18 bp, Artificial sequence
  Synthetic oligonucleotide
tttagggtgtgctgtctg

SEQ ID NO: 127 - DNA, 18 bp, Artificial sequence
  Synthetic oligonucleotide
tgcgcacatgctcgaaat

SEQ ID NO: 128 - DNA, 18 bp, Artificial sequence
  Synthetic oligonucleotide
ggatccaccatgcgcaca

SEQ ID NO: 129 - DNA, 18 bp, Artificial sequence
  Synthetic oligonucleotide
gcggctttcttgggatcc

SEQ ID NO: 130 - DNA, 18 bp, Artificial sequence
  Synthetic oligonucleotide
accggatctgagcggctt

SEQ ID NO: 131 - DNA, 18 bp, Artificial sequence
  Synthetic oligonucleotide
aacctgggaccggatctg

SEQ ID NO: 132 - DNA, 18 bp, Artificial sequence
  Synthetic oligonucleotide
cataaatcacacggaggt

SEQ ID NO: 133 - DNA, 18 bp, Artificial sequence
  Synthetic oligonucleotide
gagactgattcatgcgct

SEQ ID NO: 134 - DNA, 18 bp, Artificial sequence
  Synthetic oligonucleotide
ggttcactaatcatgttg

SEQ ID NO: 135 - DNA, 18 bp, Artificial sequence
  Synthetic oligonucleotide
ccgtaactgatccttggt

SEQ ID NO: 136 - DNA, 18 bp, Artificial sequence
  Synthetic oligonucleotide
gctccacggtggttttcg

SEQ ID NO: 137 - DNA, 18 bp, Artificial sequence
  Synthetic oligonucleotide
cattcacgggaaggagct

SEQ ID NO: 138 - DNA, 18 bp, Artificial sequence
  Synthetic oligonucleotide
atgccacggctggagatc

SEQ ID NO: 139 - DNA, 18 bp, Artificial sequence
  Synthetic oligonucleotide
tcggtcggcagcagggcg

SEQ ID NO: 140 - DNA, 18 bp, Artificial sequence
  Synthetic oligonucleotide
tggtcagtcctcggtcgg

SEQ ID NO: 141 - DNA, 18 bp, Artificial sequence
  Synthetic oligonucleotide
cctggtcgagtggtcagt

SEQ ID NO: 142 - DNA, 18 bp, Artificial sequence
  Synthetic oligonucleotide
caacccagaacctggtcg

SEQ ID NO: 143 - DNA, 18 bp, Artificial sequence
  Synthetic oligonucleotide
cagagatctcctccgtct

SEQ ID NO: 144 - DNA, 18 bp, Artificial sequence
  Synthetic oligonucleotide
tcctgagtcatgtcggaa

SEQ ID NO: 145 - DNA, 18 bp, Artificial sequence
  Synthetic oligonucleotide
gatgatgaacttcatatc

SEQ ID NO: 146 - DNA, 18 bp, Artificial sequence
  Synthetic oligonucleotide
gtccaatgattgcacctt

SEQ ID NO: 147 - DNA, 18 bp, Artificial sequence
  Synthetic oligonucleotide
ccgcccaccatgagtcca

SEQ ID NO: 148 - DNA, 18 bp, Artificial sequence
  Synthetic oligonucleotide
gctatgacaacaccgccc

SEQ ID NO: 149 - DNA, 18 bp, Artificial sequence
  Synthetic oligonucleotide
aggtgatgacgatcactg

SEQ ID NO: 150 - DNA, 18 bp, Artificial sequence
  Synthetic oligonucleotide
gtagccgttctgctgcat

SEQ ID NO: 151 - DNA, 18 bp, Artificial sequence
  Synthetic oligonucleotide
cacctctcgaaccacctc

SEQ ID NO: 152 - DNA, 18 bp, Artificial sequence
  Synthetic oligonucleotide
cttgttcagagcacacct

SEQ ID NO: 153 - DNA, 18 bp, Artificial sequence
  Synthetic oligonucleotide
gccccgtctcggcttgtt

SEQ ID NO: 154 - DNA, 18 bp, Artificial sequence
  Synthetic oligonucleotide
ttgctcggcacggccccg

SEQ ID NO: 155 - DNA, 18 bp, Artificial sequence
  Synthetic oligonucleotide
gcgggagatcattgctcg

SEQ ID NO: 156 - DNA, 18 bp, Artificial sequence
  Synthetic oligonucleotide
gccacatccgccgtaaaa

SEQ ID NO: 157 - DNA, 18 bp, Artificial sequence
  Synthetic oligonucleotide
ctgtgtcaaagttgttcc

SEQ ID NO: 158 - DNA, 18 bp, Artificial sequence
  Synthetic oligonucleotide
cacacggccatgcagtac

SEQ ID NO: 159 - DNA, 18 bp, Artificial sequence
  Synthetic oligonucleotide
gggtagtcttgagtaaac

SEQ ID NO: 160 - DNA, 18 bp, Artificial sequence
  Synthetic oligonucleotide
ctcgggcaagaggttcct

SEQ ID NO: 161 - DNA, 18 bp, Artificial sequence
  Synthetic oligonucleotide
ttaacaggatctcgggca

SEQ ID NO: 162 - DNA, 18 bp, Artificial sequence
  Synthetic oligonucleotide
accaacaagtcctctaat

SEQ ID NO: 163 - DNA, 18 bp, Artificial sequence
  Synthetic oligonucleotide
ttgcaccagttctggatg

SEQ ID NO: 164 - DNA, 18 bp, Artificial sequence
  Synthetic oligonucleotide
ttgcggccccgcttgcac

SEQ ID NO: 165 - DNA, 18 bp, Artificial sequence
  Synthetic oligonucleotide
ctgcatgtctctttggcg

SEQ ID NO: 166 - DNA, 18 bp, Artificial sequence
  Synthetic oligonucleotide
gacattctctctcggtgc

SEQ ID NO: 167 - DNA, 18 bp, Artificial sequence
  Synthetic oligonucleotide
aacctggtcgagtggtca

SEQ ID NO: 168 - DNA, 18 bp, Artificial sequence
  Synthetic oligonucleotide
gcagtgccaaaccgggca

SEQ ID NO: 169 - DNA, 18 bp, Artificial sequence
  Synthetic oligonucleotide
cccgagccgtccaggcgg

SEQ ID NO: 170 - DNA, 18 bp, Artificial sequence
  Synthetic oligonucleotide
atcagtgggtacctccag

SEQ ID NO: 171 - DNA, 18 bp, Artificial sequence
  Synthetic oligonucleotide
agaacatggcaatctggg

SEQ ID NO: 172 - DNA, 18 bp, Artificial sequence
  Synthetic oligonucleotide
ttggtatcaatgcaggtt

SEQ ID NO: 173 - DNA, 18 bp, Artificial sequence
  Synthetic oligonucleotide
atactgcaggatgccttc

SEQ ID NO: 174 - DNA, 18 bp, Artificial sequence
  Synthetic oligonucleotide
agggtagacttcttggca

SEQ ID NO: 175 - DNA, 18 bp, Artificial sequence
  Synthetic oligonucleotide
ggtgatctgcagttcagg

SEQ ID NO: 176 - DNA, 18 bp, Artificial sequence
  Synthetic oligonucleotide
ggttggttggcttctacc

SEQ ID NO: 177 - DNA, 18 bp, Artificial sequence
  Synthetic oligonucleotide
ctggatggtcactggttg

SEQ ID NO: 178 - DNA, 18 bp, Artificial sequence
  Synthetic oligonucleotide
ttgcactgcttgcggccc

SEQ ID NO: 179 - DNA, 18 bp, Artificial sequence
  Synthetic oligonucleotide
tagggaatcacaaagtgg

SEQ ID NO: 180 - DNA, 18 bp, Artificial sequence
  Synthetic oligonucleotide
actaagcagcggtaggga

SEQ ID NO: 181 - DNA, 18 bp, Artificial sequence
  Synthetic oligonucleotide
tcaggaacgagaagggca

SEQ ID NO: 182 - DNA, 18 bp, Artificial sequence
  Synthetic oligonucleotide
cctggtgtaagaatttgc

SEQ ID NO: 183 - DNA, 18 bp, Artificial sequence
  Synthetic oligonucleotide
gagtttcgcaaacatcca

SEQ ID NO: 184 - DNA, 18 bp, Artificial sequence
  Synthetic oligonucleotide
cggtgtgccagtgaagat

SEQ ID NO: 185 - DNA, 18 bp, Artificial sequence
  Synthetic oligonucleotide
tgccgtagtcatgcaagt

SEQ ID NO: 186 - DNA, 18 bp, Artificial sequence
  Synthetic oligonucleotide
ccgcagggcagcaacatg

SEQ ID NO: 187 - DNA, 18 bp, Artificial sequence
  Synthetic oligonucleotide
ggaacttgtcaattccgc

SEQ ID NO: 188 - DNA, 18 bp, Artificial sequence
  Synthetic oligonucleotide
actctacccctcggaact

SEQ ID NO: 189 - DNA, 18 bp, Artificial sequence
  Synthetic oligonucleotide
cctccgcatcagcagaat

SEQ ID NO: 190 - DNA, 18 bp, Artificial sequence
  Synthetic oligonucleotide
cagacatccgagtcatcc

SEQ ID NO: 191 - DNA, 18 bp, Artificial sequence
  Synthetic oligonucleotide
tgtgtctgctccgcccca

SEQ ID NO: 192 - DNA, 18 bp, Artificial sequence
  Synthetic oligonucleotide
cccatctgcatagtctgt

SEQ ID NO: 193 - DNA, 18 bp, Artificial sequence
  Synthetic oligonucleotide
tcgaaccacctcttccac

SEQ ID NO: 194 - DNA, 18 bp, Artificial sequence
  Synthetic oligonucleotide
ttgtcaacggcatcaggg

SEQ ID NO: 195 - DNA, 18 bp, Artificial sequence
  Synthetic oligonucleotide
caggtgtctcgagatact

SEQ ID NO: 196 - DNA, 18 bp, Artificial sequence
  Synthetic oligonucleotide
cggtgcttggcctcaagc

SEQ ID NO: 197 - DNA, 18 bp, Artificial sequence
  Synthetic oligonucleotide
tggataactgccttctta

SEQ ID NO: 198 - DNA, 18 bp, Artificial sequence
  Synthetic oligonucleotide
cagagcggtgatgtagtt

SEQ ID NO: 199 - DNA, 18 bp, Artificial sequence
  Synthetic oligonucleotide
ggacatacttctttagca

SEQ ID NO: 200 - DNA, 18 bp, Artificial sequence
  Synthetic oligonucleotide
tctgttctgcgcggacat

SEQ ID NO: 201 - DNA, 18 bp, Artificial sequence
  Synthetic oligonucleotide
gctttagggtgtgctgtc

SEQ ID NO: 202 - DNA, 18 bp, Artificial sequence
  Synthetic oligonucleotide
catgcgcacatgctcgaa

SEQ ID NO: 203 - DNA, 18 bp, Artificial sequence
  Synthetic oligonucleotide
gggatccaccatgcgcac

SEQ ID NO: 204 - DNA, 18 bp, Artificial sequence
  Synthetic oligonucleotide
gagcggctttcttgggat

SEQ ID NO: 205 - DNA, 18 bp, Artificial sequence
  Synthetic oligonucleotide
gaccggatctgagcggct

SEQ ID NO: 206 - DNA, 18 bp, Artificial sequence
  Synthetic oligonucleotide
taacctgggaccggatct

SEQ ID NO: 207 - DNA, 18 bp, Artificial sequence
  Synthetic oligonucleotide
gctcataaatcacacgga

SEQ ID NO: 208 - DNA, 18 bp, Artificial sequence
  Synthetic oligonucleotide
tcggccactgcaggcacg

SEQ ID NO: 209 - DNA, 18 bp, Artificial sequence
  Synthetic oligonucleotide
cttggttcactaatcatg

SEQ ID NO: 210 - DNA, 18 bp, Artificial sequence
  Synthetic oligonucleotide
tccgtaactgatccttgg

SEQ ID NO: 211 - DNA, 18 bp, Artificial sequence
  Synthetic oligonucleotide
aggagctccacggtggtt

SEQ ID NO: 212 - DNA, 18 bp, Artificial sequence
  Synthetic oligonucleotide
ccattcacgggaaggagc

SEQ ID NO: 213 - DNA, 18 bp, Artificial sequence
  Synthetic oligonucleotide
gaatgccacggctggaga

SEQ ID NO: 214 - DNA, 18 bp, Artificial sequence
  Synthetic oligonucleotide
cctcggtcggcagcaggg

SEQ ID NO: 215 - DNA, 18 bp, Artificial sequence
  Synthetic oligonucleotide
agtggtcagtcctcggtc

SEQ ID NO: 216 - DNA, 18 bp, Artificial sequence
  Synthetic oligonucleotide
tgatatttgtcaacccag

SEQ ID NO: 217 - DNA, 18 bp, Artificial sequence
  Synthetic oligonucleotide
ttcagagatctcctccgt

SEQ ID NO: 218 - DNA, 18 bp, Artificial sequence
  Synthetic oligonucleotide
atcctgagtcatgtcgga

SEQ ID NO: 219 - DNA, 18 bp, Artificial sequence
  Synthetic oligonucleotide
acctttgtttgaacccac

SEQ ID NO: 220 - DNA, 18 bp, Artificial sequence
  Synthetic oligonucleotide
gagtccaatgattgcacc

SEQ ID NO: 221 - DNA, 18 bp, Artificial sequence
  Synthetic oligonucleotide
acaccgcccaccatgagt

SEQ ID NO: 222 - DNA, 18 bp, Artificial sequence
  Synthetic oligonucleotide
tcgctatgacaacaccgc

SEQ ID NO: 223 - DNA, 18 bp, Artificial sequence
  Synthetic oligonucleotide
atggatgtgtactgtttc

SEQ ID NO: 224 - DNA, 18 bp, Artificial sequence
  Synthetic oligonucleotide
cgtagccgttctgctgca

SEQ ID NO: 225 - DNA, 18 bp, Artificial sequence
  Synthetic oligonucleotide
cacacctctcgaaccacc

SEQ ID NO: 226 - DNA, 18 bp, Artificial sequence
  Synthetic oligonucleotide
gcttgttcagagcacacc

SEQ ID NO: 227 - DNA, 18 bp, Artificial sequence
  Synthetic oligonucleotide
cggccccgtctcggcttg

SEQ ID NO: 228 - DNA, 18 bp, Artificial sequence
  Synthetic oligonucleotide
cattgctcggcacggccc

SEQ ID NO: 229 - DNA, 18 bp, Artificial sequence
  Synthetic oligonucleotide
cagcgggagatcattgct

SEQ ID NO: 230 - DNA, 18 bp, Artificial sequence
  Synthetic oligonucleotide
gtcacatcaaagtaccag

SEQ ID NO: 231 - DNA, 18 bp, Artificial sequence
  Synthetic oligonucleotide
cgccacatccgccgtaaa

SEQ ID NO: 232 - DNA, 18 bp, Artificial sequence
  Synthetic oligonucleotide
ccatgcagtactcttctg

SEQ ID NO: 233 - DNA, 18 bp, Artificial sequence
  Synthetic oligonucleotide
cacacacggccatgcagt

SEQ ID NO: 234 - DNA, 18 bp, Artificial sequence
  Synthetic oligonucleotide
cctgggtagtcttgagta

SEQ ID NO: 235 - DNA, 18 bp, Artificial sequence
  Synthetic oligonucleotide
atctcgggcaagaggttc

SEQ ID NO: 236 - DNA, 18 bp, Artificial sequence
  Synthetic oligonucleotide
agtttaacaggatctcgg

SEQ ID NO: 237 - DNA, 18 bp, Artificial sequence
  Synthetic oligonucleotide
cttgcaccagttctggat

SEQ ID NO: 238 - DNA, 18 bp, Artificial sequence
  Synthetic oligonucleotide
gcttgcggccccgcttgc

SEQ ID NO: 239 - DNA, 18 bp, Artificial sequence
  Synthetic oligonucleotide
gccgccacatccgccgta

SEQ ID NO: 240 - DNA, 18 bp, Artificial sequence
  Synthetic oligonucleotide
ggcggcggcggtcattga

SEQ ID NO: 241 - DNA, 18 bp, Artificial sequence
  Synthetic oligonucleotide
agcagtgccaaaccgggc

SEQ ID NO: 242 - DNA, 18 bp, Artificial sequence
  Synthetic oligonucleotide
gcccgagccgtccaggcg

SEQ ID NO: 243 - DNA, 18 bp, Artificial sequence
  Synthetic oligonucleotide
accatcagtgggtacctc

SEQ ID NO: 244 - DNA, 18 bp, Artificial sequence
  Synthetic oligonucleotide
tgtgcatgttcagtctgc

SEQ ID NO: 245 - DNA, 18 bp, Artificial sequence
  Synthetic oligonucleotide
ccttggtatcaatgcagg

SEQ ID NO: 246 - DNA, 18 bp, Artificial sequence
  Synthetic oligonucleotide
caatactgcaggatgcct

SEQ ID NO: 247 - DNA, 18 bp, Artificial sequence
  Synthetic oligonucleotide
cagggtagacttcttggc

SEQ ID NO: 248 - DNA, 18 bp, Artificial sequence
  Synthetic oligonucleotide
tggtgatctgcagttcag

SEQ ID NO: 249 - DNA, 18 bp, Artificial sequence
  Synthetic oligonucleotide
ctggttggttggcttcta

SEQ ID NO: 250 - DNA, 18 bp, Artificial sequence
  Synthetic oligonucleotide
ttctggatggtcactggt

SEQ ID NO: 251 - DNA, 18 bp, Artificial sequence
  Synthetic oligonucleotide
cttgcactgcttgcggcc

SEQ ID NO: 252 - DNA, 18 bp, Artificial sequence
  Synthetic oligonucleotide
agcggtagggaatcacaa

SEQ ID NO: 253 - DNA, 18 bp, Artificial sequence
  Synthetic oligonucleotide
caactaagcagcggtagg

SEQ ID NO: 254 - DNA, 18 bp, Artificial sequence
  Synthetic oligonucleotide
gtcaggaacgagaagggc

SEQ ID NO: 255 - DNA, 18 bp, Artificial sequence
  Synthetic oligonucleotide
cctctcctggtgtaagaa

SEQ ID NO: 256 - DNA, 18 bp, Artificial sequence
  Synthetic oligonucleotide
agatgagtttcgcaaaca

SEQ ID NO: 257 - DNA, 18 bp, Artificial sequence
  Synthetic oligonucleotide
cgacggtgtgccagtgaa

SEQ ID NO: 258 - DNA, 18 bp, Artificial sequence
  Synthetic oligonucleotide
ggtactcttctcactgca

SEQ ID NO: 259 - DNA, 18 bp, Artificial sequence
  Synthetic oligonucleotide
catgccgtagtcatgcaa

SEQ ID NO: 260 - DNA, 18 bp, Artificial sequence
  Synthetic oligonucleotide
ttccgcagggcagcaaca

SEQ ID NO: 261 - DNA, 18 bp, Artificial sequence
  Synthetic oligonucleotide
tcggaacttgtcaattcc

SEQ ID NO: 262 - DNA, 18 bp, Artificial sequence
  Synthetic oligonucleotide
aactctacccctcggaac

SEQ ID NO: 263 - DNA, 18 bp, Artificial sequence
  Synthetic oligonucleotide
agtcatcctcctccgcat

SEQ ID NO: 264 - DNA, 18 bp, Artificial sequence
  Synthetic oligonucleotide
ccagacatccgagtcatc

SEQ ID NO: 265 - DNA, 18 bp, Artificial sequence
  Synthetic oligonucleotide
tctgtgtctgctccgccc

SEQ ID NO: 266 - DNA, 18 bp, Artificial sequence
  Synthetic oligonucleotide
actcccatctgcatagtc

SEQ ID NO: 267 - DNA, 18 bp, Artificial sequence
  Synthetic oligonucleotide
ctcgaaccacctcttcca

SEQ ID NO: 268 - DNA, 18 bp, Artificial sequence
  Synthetic oligonucleotide
gatacttgtcaacggcat

SEQ ID NO: 269 - DNA, 18 bp, Artificial sequence
  Synthetic oligonucleotide
ccccaggtgtctcgagat

SEQ ID NO: 270 - DNA, 18 bp, Artificial sequence
  Synthetic oligonucleotide
ctcggtgcttggcctcaa

SEQ ID NO: 271 - DNA, 18 bp, Artificial sequence
  Synthetic oligonucleotide
ggacattctctctcggtg

SEQ ID NO: 272 - DNA, 18 bp, Artificial sequence
  Synthetic oligonucleotide
cctgcagagcggtgatgt

SEQ ID NO: 273 - DNA, 18 bp, Artificial sequence
  Synthetic oligonucleotide
cgcggacatacttcttta

SEQ ID NO: 274 - DNA, 18 bp, Artificial sequence
  Synthetic oligonucleotide
cttctgttctgcgcggac

SEQ ID NO: 275 - DNA, 18 bp, Artificial sequence
  Synthetic oligonucleotide
atgctttagggtgtgctg

SEQ ID NO: 276 - DNA, 18 bp, Artificial sequence
  Synthetic oligonucleotide
ccatgcgcacatgctcga

SEQ ID NO: 277 - DNA, 18 bp, Artificial sequence
  Synthetic oligonucleotide
ttgggatccaccatgcgc

SEQ ID NO: 278 - DNA, 18 bp, Artificial sequence
  Synthetic oligonucleotide
ctgagcggctttcttggg

SEQ ID NO: 279 - DNA, 18 bp, Artificial sequence
  Synthetic oligonucleotide
ggaccggatctgagcggc

SEQ ID NO: 280 - DNA, 18 bp, Artificial sequence
  Synthetic oligonucleotide
cataacctgggaccggat

SEQ ID NO: 281 - DNA, 18 bp, Artificial sequence
  Synthetic oligonucleotide
gcgctcataaatcacacg

SEQ ID NO: 282 - DNA, 18 bp, Artificial sequence
  Synthetic oligonucleotide
gaatctcctcggccactg

SEQ ID NO: 283 - DNA, 18 bp, Artificial sequence
  Synthetic oligonucleotide
tccttggttcactaatca

SEQ ID NO: 284 - DNA, 18 bp, Artificial sequence
  Synthetic oligonucleotide
cgtttccgtaactgatcc

SEQ ID NO: 285 - DNA, 18 bp, Artificial sequence
  Synthetic oligonucleotide
gaaggagctccacggtgg

SEQ ID NO: 286 - DNA, 18 bp, Artificial sequence
  Synthetic oligonucleotide
ctccattcacgggaagga

SEQ ID NO: 287 - DNA, 18 bp, Artificial sequence
  Synthetic oligonucleotide
aagaatgccacggctgga

SEQ ID NO: 288 - DNA, 18 bp, Artificial sequence
  Synthetic oligonucleotide
gtcctcggtcggcagcag

SEQ ID NO: 289 - DNA, 18 bp, Artificial sequence
  Synthetic oligonucleotide
cgagtggtcagtcctcgg

SEQ ID NO: 290 - DNA, 18 bp, Artificial sequence
  Synthetic oligonucleotide
gaacctggtcgagtggtc

SEQ ID NO: 291 - DNA, 18 bp, Artificial sequence
  Synthetic oligonucleotide
cctccgtcttgatatttg

SEQ ID NO: 292 - DNA, 18 bp, Artificial sequence
  Synthetic oligonucleotide
gtcggaattctgcatcca

SEQ ID NO: 293 - DNA, 18 bp, Artificial sequence
  Synthetic oligonucleotide
tatcctgagtcatgtcgg

SEQ ID NO: 294 - DNA, 18 bp, Artificial sequence
  Synthetic oligonucleotide
gcacctttgtttgaaccc

SEQ ID NO: 295 - DNA, 18 bp, Artificial sequence
  Synthetic oligonucleotide
atgagtccaatgattgca

SEQ ID NO: 296 - DNA, 18 bp, Artificial sequence
  Synthetic oligonucleotide
aacaccgcccaccatgag

SEQ ID NO: 297 - DNA, 18 bp, Artificial sequence
  Synthetic oligonucleotide
cactgtcgctatgacaac

SEQ ID NO: 298 - DNA, 18 bp, Artificial sequence
  Synthetic oligonucleotide
ccacaccatgatgaatgg

SEQ ID NO: 299 - DNA, 18 bp, Artificial sequence
  Synthetic oligonucleotide
ttgtaggttggattttcg

SEQ ID NO: 300 - DNA, 18 bp, Artificial sequence
  Synthetic oligonucleotide
gcacacctctcgaaccac

SEQ ID NO: 301 - DNA, 18 bp, Artificial sequence
  Synthetic oligonucleotide
tcggcttgttcagagcac

SEQ ID NO: 302 - DNA, 18 bp, Artificial sequence
  Synthetic oligonucleotide
cacggccccgtctcggct

SEQ ID NO: 303 - DNA, 18 bp, Artificial sequence
  Synthetic oligonucleotide
atcattgctcggcacggc

SEQ ID NO: 304 - DNA, 18 bp, Artificial sequence
  Synthetic oligonucleotide
taccagcgggagatcatt

SEQ ID NO: 305 - DNA, 18 bp, Artificial sequence
  Synthetic oligonucleotide
cagtcacatcaaagtacc

SEQ ID NO: 306 - DNA, 18 bp, Artificial sequence
  Synthetic oligonucleotide
ggccatgcagtactcttc

SEQ ID NO: 307 - DNA, 18 bp, Artificial sequence
  Synthetic oligonucleotide
cgctgccacacacggcca

SEQ ID NO: 308 - DNA, 18 bp, Artificial sequence
  Synthetic oligonucleotide
tcctgggtagtcttgagt

SEQ ID NO: 309 - DNA, 18 bp, Artificial sequence
  Synthetic oligonucleotide
gatctcgggcaagaggtt

SEQ ID NO: 310 - DNA, 18 bp, Artificial sequence
  Synthetic oligonucleotide
ggaagtttaacaggatct

SEQ ID NO: 311 - DNA, 18 bp, Artificial sequence
  Synthetic oligonucleotide
gttctggatggtcactgg

SEQ ID NO: 312 - DNA, 18 bp, Artificial sequence
  Synthetic oligonucleotide
cgcttgcaccagttctgg

SEQ ID NO: 313 - DNA, 18 bp, Artificial sequence
  Synthetic oligonucleotide
ctgcttgcggccccgctt

SEQ ID NO: 314 - DNA, 18 bp, Artificial sequence
  Synthetic oligonucleotide
gtcataacctgggaccgg

SEQ ID NO: 315 - DNA, 18 bp, Artificial sequence
  Synthetic oligonucleotide
ggagcagtgccaaaccgg

SEQ ID NO: 316 - DNA, 18 bp, Artificial sequence
  Synthetic oligonucleotide
cgcccgagccgtccaggc

SEQ ID NO: 317 - DNA, 18 bp, Artificial sequence
  Synthetic oligonucleotide
gcattaccatcagtgggt

SEQ ID NO: 318 - DNA, 18 bp, Artificial sequence
  Synthetic oligonucleotide
ggtccctgatggatctga

SEQ ID NO: 319 - DNA, 18 bp, Artificial sequence
  Synthetic oligonucleotide
cttccttggtatcaatgc

SEQ ID NO: 320 - DNA, 18 bp, Artificial sequence
  Synthetic oligonucleotide
gcaatactgcaggatgcc

SEQ ID NO: 321 - DNA, 18 bp, Artificial sequence
  Synthetic oligonucleotide
gcagttcagggtagactt

SEQ ID NO: 322 - DNA, 18 bp, Artificial sequence
  Synthetic oligonucleotide
cttctaccacattggtga

SEQ ID NO: 323 - DNA, 18 bp, Artificial sequence
  Synthetic oligonucleotide
tcactggttggttggctt

SEQ ID NO: 324 - DNA, 18 bp, Artificial sequence
  Synthetic oligonucleotide
gtcttgcactgcttgcgg

SEQ ID NO: 325 - DNA, 18 bp, Artificial sequence
  Synthetic oligonucleotide
cagcggtagggaatcaca

SEQ ID NO: 326 - DNA, 18 bp, Artificial sequence
  Synthetic oligonucleotide
ccaactaagcagcggtag

SEQ ID NO: 327 - DNA, 18 bp, Artificial sequence
  Synthetic oligonucleotide
cacttgtcaggaacgaga

SEQ ID NO: 328 - DNA, 18 bp, Artificial sequence
  Synthetic oligonucleotide
atcctctcctggtgtaag

SEQ ID NO: 329 - DNA, 18 bp, Artificial sequence
  Synthetic oligonucleotide
gaagatgagtttcgcaaa

SEQ ID NO: 330 - DNA, 18 bp, Artificial sequence
  Synthetic oligonucleotide
gcgacggtgtgccagtga

SEQ ID NO: 331 - DNA, 18 bp, Artificial sequence
  Synthetic oligonucleotide
gttggtactcttctcact

SEQ ID NO: 332 - DNA, 18 bp, Artificial sequence
  Synthetic oligonucleotide
acatgccgtagtcatgca

SEQ ID NO: 333 - DNA, 18 bp, Artificial sequence
  Synthetic oligonucleotide
aattccgcagggcagcaa

SEQ ID NO: 334 - DNA, 18 bp, Artificial sequence
  Synthetic oligonucleotide
cccctcggaacttgtcaa

SEQ ID NO: 335 - DNA, 18 bp, Artificial sequence
  Synthetic oligonucleotide
caaactctacccctcgga

SEQ ID NO: 336 - DNA, 18 bp, Artificial sequence
  Synthetic oligonucleotide
gagtcatcctcctccgca

SEQ ID NO: 337 - DNA, 18 bp, Artificial sequence
  Synthetic oligonucleotide
caccagacatccgagtca

SEQ ID NO: 338 - DNA, 18 bp, Artificial sequence
  Synthetic oligonucleotide
agtctgtgtctgctccgc

SEQ ID NO: 339 - DNA, 18 bp, Artificial sequence
  Synthetic oligonucleotide
cactcccatctgcatagt

SEQ ID NO: 340 - DNA, 18 bp, Artificial sequence
  Synthetic oligonucleotide
ggctgctgttgtaggaac

SEQ ID NO: 341 - DNA, 18 bp, Artificial sequence
  Synthetic oligonucleotide
gagatacttgtcaacggc

SEQ ID NO: 342 - DNA, 18 bp, Artificial sequence
  Synthetic oligonucleotide
tccccaggtgtctcgaga

SEQ ID NO: 343 - DNA, 18 bp, Artificial sequence
  Synthetic oligonucleotide
ctctcggtgcttggcctc

SEQ ID NO: 344 - DNA, 18 bp, Artificial sequence
  Synthetic oligonucleotide
gggacattctctctcggt

SEQ ID NO: 345 - DNA, 18 bp, Artificial sequence
  Synthetic oligonucleotide
ggtgatgtagttctccag

SEQ ID NO: 346 - DNA, 18 bp, Artificial sequence
  Synthetic oligonucleotide
gcctgcagagcggtgatg

SEQ ID NO: 347 - DNA, 18 bp, Artificial sequence
  Synthetic oligonucleotide
tgcgcggacatacttctt

SEQ ID NO: 348 - DNA, 18 bp, Artificial sequence
  Synthetic oligonucleotide
gtccttctgttctgcgcg

SEQ ID NO: 349 - DNA, 18 bp, Artificial sequence
  Synthetic oligonucleotide
gctcgaaatgctttaggg

SEQ ID NO: 350 - DNA, 18 bp, Artificial sequence
  Synthetic oligonucleotide
ccaccatgcgcacatgct

SEQ ID NO: 351 - DNA, 18 bp, Artificial sequence
  Synthetic oligonucleotide
cttgggatccaccatgcg

SEQ ID NO: 352 - DNA, 18 bp, Artificial sequence
  Synthetic oligonucleotide
atctgagcggctttcttg

SEQ ID NO: 353 - DNA, 18 bp, Artificial sequence
  Synthetic oligonucleotide
tgggaccggatctgagcg

SEQ ID NO: 354 - DNA, 18 bp, Artificial sequence
  Synthetic oligonucleotide
catgcgctcataaatcac

SEQ ID NO: 355 - DNA, 18 bp, Artificial sequence
  Synthetic oligonucleotide
ctgaatctcctcggccac

SEQ ID NO: 356 - DNA, 18 bp, Artificial sequence
  Synthetic oligonucleotide
gatccttggttcactaat

SEQ ID NO: 357 - DNA, 18 bp, Artificial sequence
  Synthetic oligonucleotide
gatggcatgagagcatcg

SEQ ID NO: 358 - DNA, 18 bp, Artificial sequence
  Synthetic oligonucleotide
gggaaggagctccacggt

SEQ ID NO: 359 - DNA, 18 bp, Artificial sequence
  Synthetic oligonucleotide
ctctccattcacgggaag

SEQ ID NO: 360 - DNA, 18 bp, Artificial sequence
  Synthetic oligonucleotide
ccaaaagaatgccacggc

SEQ ID NO: 361 - DNA, 18 bp, Artificial sequence
  Synthetic oligonucleotide
cagtcctcggtcggcagc

SEQ ID NO: 362 - DNA, 18 bp, Artificial sequence
  Synthetic oligonucleotide
gtcgagtggtcagtcctc

SEQ ID NO: 363 - DNA, 18 bp, Artificial sequence
  Synthetic oligonucleotide
cagaacctggtcgagtgg

SEQ ID NO: 364 - DNA, 18 bp, Artificial sequence
  Synthetic oligonucleotide
tctcctccgtcttgatat

SEQ ID NO: 365 - DNA, 18 bp, Artificial sequence
  Synthetic oligonucleotide
tgtcggaattctgcatcc

SEQ ID NO: 366 - DNA, 18 bp, Artificial sequence
  Synthetic oligonucleotide
catatcctgagtcatgtc

SEQ ID NO: 367 - DNA, 18 bp, Artificial sequence
  Synthetic oligonucleotide
ttgcacctttgtttgaac

SEQ ID NO: 368 - DNA, 18 bp, Artificial sequence
  Synthetic oligonucleotide
ccatgagtccaatgattg

SEQ ID NO: 369 - DNA, 18 bp, Artificial sequence
  Synthetic oligonucleotide
caacaccgcccaccatga

SEQ ID NO: 370 - DNA, 18 bp, Artificial sequence
  Synthetic oligonucleotide
cgatcactgtcgctatga

SEQ ID NO: 371 - DNA, 18 bp, Artificial sequence
  Synthetic oligonucleotide
cgttctgctgcatcttgg

SEQ ID NO: 372 - DNA, 18 bp, Artificial sequence
  Synthetic oligonucleotide
agaacttgtaggttggat

SEQ ID NO: 373 - DNA, 18 bp, Artificial sequence
  Synthetic oligonucleotide
gagcacacctctcgaacc

SEQ ID NO: 374 - DNA, 18 bp, Artificial sequence
  Synthetic oligonucleotide
tctcggcttgttcagagc

SEQ ID NO: 375 - DNA, 18 bp, Artificial sequence
  Synthetic oligonucleotide
gcacggccccgtctcggc

SEQ ID NO: 376 - DNA, 18 bp, Artificial sequence
  Synthetic oligonucleotide
ggagatcattgctcggca

SEQ ID NO: 377 - DNA, 18 bp, Artificial sequence
  Synthetic oligonucleotide
agtaccagcgggagatca

SEQ ID NO: 378 - DNA, 18 bp, Artificial sequence
  Synthetic oligonucleotide
gggcacacttcccttcag

SEQ ID NO: 379 - DNA, 18 bp, Artificial sequence
  Synthetic oligonucleotide
tgccgccacatccgccgt

SEQ ID NO: 380 - DNA, 18 bp, Artificial sequence
  Synthetic oligonucleotide
acggccatgcagtactct

SEQ ID NO: 381 - DNA, 18 bp, Artificial sequence
  Synthetic oligonucleotide
gcgctgccacacacggcc

SEQ ID NO: 382 - DNA, 18 bp, Artificial sequence
  Synthetic oligonucleotide
ggttcctgggtagtcttg

SEQ ID NO: 383 - DNA, 18 bp, Artificial sequence
  Synthetic oligonucleotide
ggatctcgggcaagaggt

SEQ ID NO: 384 - DNA, 18 bp, Artificial sequence
  Synthetic oligonucleotide
ggctgctgttgtaggaag

SEQ ID NO: 385 - DNA, 18 bp, Artificial sequence
  Synthetic oligonucleotide
gcagttcagggtagacct

SEQ ID NO: 386 - DNA, 18 bp, Artificial sequence
  Synthetic oligonucleotide
cagttctggatggtcact

SEQ ID NO: 387 - DNA, 18 bp, Artificial sequence
  Synthetic oligonucleotide
ccgcttgcaccagttctg

SEQ ID NO: 388 - DNA, 18 bp, Artificial sequence
  Synthetic oligonucleotide
gtctctttggcgacggtg

SEQ ID NO: 389 - DNA, 18 bp, Artificial sequence
  Synthetic oligonucleotide
ccgccgtaaaagaatggg

SEQ ID NO: 390 - DNA, 18 bp, Artificial sequence
  Synthetic oligonucleotide
gacctgggacattctctc

SEQ ID NO: 391 - DNA, 18 bp, Artificial sequence
  Synthetic oligonucleotide
caggagcagtgccaaacc

SEQ ID NO: 392 - DNA, 18 bp, Artificial sequence
  Synthetic oligonucleotide
gcgcccgagccgtccagg

SEQ ID NO: 393 - DNA, 18 bp, Artificial sequence
  Synthetic oligonucleotide
ccagcattaccatcagtg

SEQ ID NO: 394 - DNA, 18 bp, Artificial sequence
  Synthetic oligonucleotide
ggttttggtccctgatgg

SEQ ID NO: 395 - DNA, 18 bp, Artificial sequence
  Synthetic oligonucleotide
gccttccttggtatcaat

SEQ ID NO: 396 - DNA, 18 bp, Artificial sequence
  Synthetic oligonucleotide
tggcaatactgcaggatg

SEQ ID NO: 397 - DNA, 18 bp, Artificial sequence
  Synthetic oligonucleotide
tgcagttcagggtagact

SEQ ID NO: 398 - DNA, 18 bp, Artificial sequence
  Synthetic oligonucleotide
ggttggcttctaccacat

SEQ ID NO: 399 - DNA, 18 bp, Artificial sequence
  Synthetic oligonucleotide
gtcactggttggttggct

SEQ ID NO: 400 - DNA, 18 bp, Artificial sequence
  Synthetic oligonucleotide
actgcttgcggccccgct

SEQ ID NO: 401 - DNA, 18 bp, Artificial sequence
  Synthetic oligonucleotide
gggtcttgcactgcttgc

SEQ ID NO: 402 - DNA, 18 bp, Artificial sequence
  Synthetic oligonucleotide
gcagcggtagggaatcac

SEQ ID NO: 403 - DNA, 18 bp, Artificial sequence
  Synthetic oligonucleotide
caccaactaagcagcggt

SEQ ID NO: 404 - DNA, 18 bp, Artificial sequence
  Synthetic oligonucleotide
tgcacttgtcaggaacga

SEQ ID NO: 405 - DNA, 18 bp, Artificial sequence
  Synthetic oligonucleotide
ccatcctctcctggtgta

SEQ ID NO: 406 - DNA, 18 bp, Artificial sequence
  Synthetic oligonucleotide
gtgaagatgagtttcgca

SEQ ID NO: 407 - DNA, 18 bp, Artificial sequence
  Synthetic oligonucleotide
gcaagttggtactcttct

SEQ ID NO: 408 - DNA, 18 bp, Artificial sequence
  Synthetic oligonucleotide
caacatgccgtagtcatg

SEQ ID NO: 409 - DNA, 18 bp, Artificial sequence
  Synthetic oligonucleotide
tcaattccgcagggcagc

SEQ ID NO: 410 - DNA, 18 bp, Artificial sequence
  Synthetic oligonucleotide
acccctcggaacttgtca

SEQ ID NO: 411 - DNA, 18 bp, Artificial sequence
  Synthetic oligonucleotide
acaaactctacccctcgg

SEQ ID NO: 412 - DNA, 18 bp, Artificial sequence
  Synthetic oligonucleotide
ccgagtcatcctcctccg

SEQ ID NO: 413 - DNA, 18 bp, Artificial sequence
  Synthetic oligonucleotide
ccgccccaccagacatcc

SEQ ID NO: 414 - DNA, 18 bp, Artificial sequence
  Synthetic oligonucleotide
tgcatagtctgtgtctgc

SEQ ID NO: 415 - DNA, 18 bp, Artificial sequence
  Synthetic oligonucleotide
tcactcccatctgcatag

SEQ ID NO: 416 - DNA, 18 bp, Artificial sequence
  Synthetic oligonucleotide
tactggctgctgttgtag

SEQ ID NO: 417 - DNA, 18 bp, Artificial sequence
  Synthetic oligonucleotide
ctcgagatacttgtcaac

SEQ ID NO: 418 - DNA, 18 bp, Artificial sequence
  Synthetic oligonucleotide
atccccaggtgtctcgag

SEQ ID NO: 419 - DNA, 18 bp, Artificial sequence
  Synthetic oligonucleotide
ctctctcggtgcttggcc

SEQ ID NO: 420 - DNA, 18 bp, Artificial sequence
  Synthetic oligonucleotide
cggtgatgtagttctcca

SEQ ID NO: 421 - DNA, 18 bp, Artificial sequence
  Synthetic oligonucleotide
cgaggaggaacagcctgc

SEQ ID NO: 422 - DNA, 18 bp, Artificial sequence
  Synthetic oligonucleotide
ctgcgcggacatacttct

SEQ ID NO: 423 - DNA, 18 bp, Artificial sequence
  Synthetic oligonucleotide
ctgtccttctgttctgcg

SEQ ID NO: 424 - DNA, 18 bp, Artificial sequence
  Synthetic oligonucleotide
atgctcgaaatgctttag

SEQ ID NO: 425 - DNA, 18 bp, Artificial sequence
  Synthetic oligonucleotide
atccaccatgcgcacatg

SEQ ID NO: 426 - DNA, 18 bp, Artificial sequence
  Synthetic oligonucleotide
ttcttgggatccaccatg

SEQ ID NO: 427 - DNA, 18 bp, Artificial sequence
  Synthetic oligonucleotide
gatctgagcggctttctt

SEQ ID NO: 428 - DNA, 18 bp, Artificial sequence
  Synthetic oligonucleotide
ctgggaccggatctgagc

SEQ ID NO: 429 - DNA, 18 bp, Artificial sequence
  Synthetic oligonucleotide
acacggaggtgtgtcata

SEQ ID NO: 430 - DNA, 18 bp, Artificial sequence
  Synthetic oligonucleotide
ttcatgcgctcataaatc

SEQ ID NO: 431 - DNA, 18 bp, Artificial sequence
  Synthetic oligonucleotide
tcctgaatctcctcggcc

SEQ ID NO: 432 - DNA, 18 bp, Artificial sequence
  Synthetic oligonucleotide
actgatccttggttcact

SEQ ID NO: 433 - DNA, 18 bp, Artificial sequence
  Synthetic oligonucleotide
cggtcaaagatggcatga

SEQ ID NO: 434 - DNA, 18 bp, Artificial sequence
  Synthetic oligonucleotide
cgggaaggagctccacgg

SEQ ID NO: 435 - DNA, 18 bp, Artificial sequence
  Synthetic oligonucleotide
gaactctccattcacggg

SEQ ID NO: 436 - DNA, 18 bp, Artificial sequence
  Synthetic oligonucleotide
tcaacaggctcaacttcg

SEQ ID NO: 437 - DNA, 18 bp, Artificial sequence
  Synthetic oligonucleotide
gtcagtcctcggtcggca

SEQ ID NO: 438 - DNA, 18 bp, Artificial sequence
  Synthetic oligonucleotide
ggtcgagtggtcagtcct

SEQ ID NO: 439 - DNA, 18 bp, Artificial sequence
  Synthetic oligonucleotide
ccagaacctggtcgagtg

SEQ ID NO: 440 - DNA, 18 bp, Artificial sequence
  Synthetic oligonucleotide
atctcctccgtcttgata

SEQ ID NO: 441 - DNA, 18 bp, Artificial sequence
  Synthetic oligonucleotide
gtcatgtcggaattctgc

SEQ ID NO: 442 - DNA, 18 bp, Artificial sequence
  Synthetic oligonucleotide
gaacttcatatcctgagt

SEQ ID NO: 443 - DNA, 18 bp, Artificial sequence
  Synthetic oligonucleotide
gattgcacctttgtttga

SEQ ID NO: 444 - DNA, 18 bp, Artificial sequence
  Synthetic oligonucleotide
caccatgagtccaatgat

SEQ ID NO: 445 - DNA, 18 bp, Artificial sequence
  Synthetic oligonucleotide
tgacaacaccgcccacca

SEQ ID NO: 446 - DNA, 18 bp, Artificial sequence
  Synthetic oligonucleotide
atgacgatcactgtcgct

SEQ ID NO: 447 - DNA, 18 bp, Artificial sequence
  Synthetic oligonucleotide
gccgttctgctgcatctt

SEQ ID NO: 448 - DNA, 18 bp, Artificial sequence
  Synthetic oligonucleotide
tctcgaaccacctcttcc

SEQ ID NO: 449 - DNA, 18 bp, Artificial sequence
  Synthetic oligonucleotide
tcagagcacacctctcga

SEQ ID NO: 450 - DNA, 18 bp, Artificial sequence
  Synthetic oligonucleotide
ccgtctcggcttgttcag

SEQ ID NO: 451 - DNA, 18 bp, Artificial sequence
  Synthetic oligonucleotide
ggcacggccccgtctcgg

SEQ ID NO: 452 - DNA, 18 bp, Artificial sequence
  Synthetic oligonucleotide
gggagatcattgctcggc

SEQ ID NO: 453 - DNA, 18 bp, Artificial sequence
  Synthetic oligonucleotide
caaagtaccagcgggaga

SEQ ID NO: 454 - DNA, 18 bp, Artificial sequence
  Synthetic oligonucleotide
ggttgccgccacatccgc

SEQ ID NO: 455 - DNA, 18 bp, Artificial sequence
  Synthetic oligonucleotide
cacggccatgcagtactc

SEQ ID NO: 456 - DNA, 18 bp, Artificial sequence
  Synthetic oligonucleotide
aactttgggacatggcgc

SEQ ID NO: 457 - DNA, 18 bp, Artificial sequence
  Synthetic oligonucleotide
gaggttcctgggtagtct

SEQ ID NO: 458 - DNA, 18 bp, Artificial sequence
  Synthetic oligonucleotide
caggatctcgggcaagag

SEQ ID NO: 459 - DNA, 18 bp, Artificial sequence
  Synthetic oligonucleotide
aagtcctctaattggtcc

SEQ ID NO: 460 - DNA, 18 bp, Artificial sequence
  Synthetic oligonucleotide
ggaactcgaaccacctct

SEQ ID NO: 461 - DNA, 18 bp, Artificial sequence
  Synthetic oligonucleotide
taggaactcgaaccacct

SEQ ID NO: 462 - DNA, 18 bp, Artificial sequence
  Synthetic oligonucleotide
gtaggaactcgaaccacc

SEQ ID NO: 463 - DNA, 18 bp, Artificial sequence
  Synthetic oligonucleotide
gttgtaggaactcgaacc

SEQ ID NO: 464 - DNA, 18 bp, Artificial sequence
  Synthetic oligonucleotide
gctgttgtaggaactcga

SEQ ID NO: 465 - DNA, 18 bp, Artificial sequence
  Synthetic oligonucleotide
ctgctgttgtaggaactc

SEQ ID NO: 466 - DNA, 18 bp, Artificial sequence
  Synthetic oligonucleotide
cagtgggtacatagttga

SEQ ID NO: 467 - DNA, 18 bp, Artificial sequence
  Synthetic oligonucleotide
ccatcagtgggtacatag

SEQ ID NO: 468 - DNA, 18 bp, Artificial sequence
  Synthetic oligonucleotide
ctgttgtaggaatggcgc

SEQ ID NO: 469 - DNA, 18 bp, Artificial sequence
  Synthetic oligonucleotide
ggctgctgttgtaggaat

SEQ ID NO: 470 - DNA, 18 bp, Artificial sequence
  Synthetic oligonucleotide
agggtagacctccagcgc

SEQ ID NO: 471 - DNA, 18 bp, Artificial sequence
  Synthetic oligonucleotide
tcagggtagacctccagc

SEQ ID NO: 472 - DNA, 18 bp, Artificial sequence
  Synthetic oligonucleotide
gttcagggtagacctcca

SEQ ID NO: 473 - DNA, 18 bp, Artificial sequence
  Synthetic oligonucleotide
cagttcagggtagacctc

SEQ ID NO: 474 - DNA, 18 bp, Artificial sequence
  Synthetic oligonucleotide
gtcaacccagaaccttcg

SEQ ID NO: 475 - DNA, 18 bp, Artificial sequence
  Synthetic oligonucleotide
tgtctctttggcgacggt

SEQ ID NO: 476 - DNA, 18 bp, Artificial sequence
  Synthetic oligonucleotide
catgtctctttggcgacg

SEQ ID NO: 477 - DNA, 18 bp, Artificial sequence
  Synthetic oligonucleotide
tgcatgtctctttggcga

SEQ ID NO: 478 - DNA, 18 bp, Artificial sequence
  Synthetic oligonucleotide
gtctgctccgccccacca

SEQ ID NO: 479 - DNA, 18 bp, Artificial sequence
  Synthetic oligonucleotide
gtgtctgctccgccccac

SEQ ID NO: 480 - DNA, 18 bp, Artificial sequence
  Synthetic oligonucleotide
ctgtgtctgctccgcccc

SEQ ID NO: 481 - DNA, 18 bp, Artificial sequence
  Synthetic oligonucleotide
gtctgtgtctgctccgcc

SEQ ID NO: 482 - DNA, 18 bp, Artificial sequence
  Synthetic oligonucleotide
tagtctgtgtctgctccg

SEQ ID NO: 483 - DNA, 18 bp, Artificial sequence
  Synthetic oligonucleotide
atagtctgtgtctgctcc

SEQ ID NO: 484 - DNA, 18 bp, Artificial sequence
  Synthetic oligonucleotide
catagtctgtgtctgctc

SEQ ID NO: 485 - DNA, 18 bp, Artificial sequence
  Synthetic oligonucleotide
gcatagtctgtgtctgct

SEQ ID NO: 486 - DNA, 18 bp, Artificial sequence
  Synthetic oligonucleotide
ctgcatagtctgtgtctg

SEQ ID NO: 487 - DNA, 18 bp, Artificial sequence
  Synthetic oligonucleotide
tcccatctgcatagtctg

SEQ ID NO: 488 - DNA, 18 bp, Artificial sequence
  Synthetic oligonucleotide
gtgtcataacctgggacc

SEQ ID NO: 489 - DNA, 18 bp, Artificial sequence
  Synthetic oligonucleotide
gtgtgtcataacctggga

SEQ ID NO: 490 - DNA, 18 bp, Artificial sequence
  Synthetic oligonucleotide
aggtgtgtcataacctgg

SEQ ID NO: 491 - DNA, 18 bp, Artificial sequence
  Synthetic oligonucleotide
ggaggtgtgtcataacct

SEQ ID NO: 492 - DNA, 18 bp, Artificial sequence
  Synthetic oligonucleotide
acggaggtgtgtcataac

SEQ ID NO: 493 - DNA, 18 bp, Artificial sequence
  Synthetic oligonucleotide
tcacacggaggtgtgtca

SEQ ID NO: 494 - DNA, 18 bp, Artificial sequence
  Synthetic oligonucleotide
aatcacacggaggtgtgt

SEQ ID NO: 495 - DNA, 18 bp, Artificial sequence
  Synthetic oligonucleotide
taaatcacacggaggtgt

SEQ ID NO: 496 - DNA, 18 bp, Artificial sequence
  Synthetic oligonucleotide
ataaatcacacggaggtg

SEQ ID NO: 497 - DNA, 18 bp, Artificial sequence
  Synthetic oligonucleotide
tcataaatcacacggagg

SEQ ID NO: 498 - DNA, 18 bp, Artificial sequence
  Synthetic oligonucleotide
ctcataaatcacacggag

SEQ ID NO: 499 - DNA, 18 bp, Artificial sequence
  Synthetic oligonucleotide
cgctcataaatcacacgg

SEQ ID NO: 500 - DNA, 18 bp, Artificial sequence
  Synthetic oligonucleotide
tgcgctcataaatcacac

SEQ ID NO: 501 - DNA, 18 bp, Artificial sequence
  Synthetic oligonucleotide
atgcgctcataaatcaca

SEQ ID NO: 502 - DNA, 20 bp, Artificial sequence
  Synthetic oligonucleotide
tgtctctttggcgacggtgt

SEQ ID NO: 503 - DNA, 20 bp, Artificial sequence
  Synthetic oligonucleotide
tgcatgtctctttggcgacg

SEQ ID NO: 504 - DNA, 20 bp, Artificial sequence
  Synthetic oligonucleotide
actgcatgtctctttggcga

SEQ ID NO: 505 - DNA, 20 bp, Artificial sequence
  Synthetic oligonucleotide
gtctgtgtctgctccgcccc

SEQ ID NO: 506 - DNA, 20 bp, Artificial sequence
  Synthetic oligonucleotide
tagtctgtgtctgctccgcc

SEQ ID NO: 507 - DNA, 20 bp, Artificial sequence
  Synthetic oligonucleotide
ctgcatagtctgtgtctgct

SEQ ID NO: 508 - DNA, 20 bp, Artificial sequence
  Synthetic oligonucleotide
cgctcataaatcacacggag

SEQ ID NO: 509 - DNA, 20 bp, Artificial sequence
  Synthetic oligonucleotide
gcgctcataaatcacacgga

SEQ ID NO: 510 - DNA, 20 bp, Artificial sequence
  Synthetic oligonucleotide
tgcgctcataaatcacacgg

SEQ ID NO: 511 - DNA, 20 bp, Artificial sequence
  Synthetic oligonucleotide
gctcataaatcacacggagg

SEQ ID NO: 512 - DNA, 20 bp, Artificial sequence
  Synthetic oligonucleotide
ctcataaatcacacggaggt

SEQ ID NO: 513 - DNA, 20 bp, Artificial sequence
  Synthetic oligonucleotide
tgcatagtctgtgtctgctc

SEQ ID NO: 514 - DNA, 20 bp, Artificial sequence
  Synthetic oligonucleotide
gcatagtctgtgtctgctcc

SEQ ID NO: 515 - DNA, 20 bp, Artificial sequence
  Synthetic oligonucleotide
tctgcatagtctgtgtctgc

SEQ ID NO: 516 - DNA, 20 bp, Artificial sequence
  Synthetic oligonucleotide
atctgcatagtctgtgtctg

SEQ ID NO: 517 - RNA, 23 nt, Artificial sequence
  Synthetic oligonucleotide
agcagugccaaaccgggcagcau

SEQ ID NO: 518 - RNA, 23 nt, Artificial sequence
  Synthetic oligonucleotide
aucgcgacccugcgcggggcacc

SEQ ID NO: 519 - RNA, 23 nt, Artificial sequence
  Synthetic oligonucleotide
gccguccaggcggccagcaggag

SEQ ID NO: 520 - RNA, 23 nt, Artificial sequence
  Synthetic oligonucleotide
uugucaacggcaucagggguacu

SEQ ID NO: 521 - RNA, 23 nt, Artificial sequence
  Synthetic oligonucleotide
aaaugggcauguucauucucauc

SEQ ID NO: 522 - RNA, 23 nt, Artificial sequence
  Synthetic oligonucleotide
uccccaggugucucgagauacuu

SEQ ID NO: 523 - RNA, 23 nt, Artificial sequence
  Synthetic oligonucleotide
agccucucuuuggcuuucuggaa

SEQ ID NO: 524 - RNA, 23 nt, Artificial sequence
  Synthetic oligonucleotide
cucucucggugcuuggccucaag

SEQ ID NO: 525 - RNA, 23 nt, Artificial sequence
  Synthetic oligonucleotide
agcaggccagcauuaccaucagu

SEQ ID NO: 526 - RNA, 23 nt, Artificial sequence
  Synthetic oligonucleotide
guggguaccuccagcgcccgagc

SEQ ID NO: 527 - RNA, 23 nt, Artificial sequence
  Synthetic oligonucleotide
ccauucuggacauucaugugcau

SEQ ID NO: 528 - RNA, 23 nt, Artificial sequence
  Synthetic oligonucleotide
auguucagucugccacagaacau

SEQ ID NO: 529 - RNA, 23 nt, Artificial sequence
  Synthetic oligonucleotide
auggcaaucugggguucagccag

SEQ ID NO: 530 - RNA, 23 nt, Artificial sequence
  Synthetic oligonucleotide
ucucucaugaccugggacauucu

SEQ ID NO: 531 - RNA, 23 nt, Artificial sequence
  Synthetic oligonucleotide
ugacguucugccucuucccauuc

SEQ ID NO: 532 - RNA, 23 nt, Artificial sequence
  Synthetic oligonucleotide
gcuuuaggcaaguucuuugcuug

SEQ ID NO: 533 - RNA, 23 nt, Artificial sequence
  Synthetic oligonucleotide
gauggaucugaaucccacuuccc

SEQ ID NO: 534 - RNA, 23 nt, Artificial sequence
  Synthetic oligonucleotide
uggauaacugccuucuuaucagc

SEQ ID NO: 535 - RNA, 23 nt, Artificial sequence
  Synthetic oligonucleotide
uccacuuucuccuggaaaugcug

SEQ ID NO: 536 - RNA, 23 nt, Artificial sequence
  Synthetic oligonucleotide
gcugcuuccuguuccaaagauuc

SEQ ID NO: 537 - RNA, 23 nt, Artificial sequence
  Synthetic oligonucleotide
ucaaugcagguuuuggucccuga

SEQ ID NO: 538 - RNA, 23 nt, Artificial sequence
  Synthetic oligonucleotide
ggguagacuucuuggcaauacug

SEQ ID NO: 539 - RNA, 23 nt, Artificial sequence
  Synthetic oligonucleotide
ugcaggaugccuuccuugguauc

SEQ ID NO: 540 - RNA, 23 nt, Artificial sequence
  Synthetic oligonucleotide
acauuggugaucugcaguucagg

SEQ ID NO: 541 - RNA, 23 nt, Artificial sequence
  Synthetic oligonucleotide
acugguugguuggcuucuaccac

SEQ ID NO: 542 - RNA, 23 nt, Artificial sequence
  Synthetic oligonucleotide
accagcugcugucucucguuggc

SEQ ID NO: 543 - RNA, 23 nt, Artificial sequence
  Synthetic oligonucleotide
uugcaccaguucuggauggucac

SEQ ID NO: 544 - RNA, 23 nt, Artificial sequence
  Synthetic oligonucleotide
uugcacugcuugcggccccgcuu

SEQ ID NO: 545 - RNA, 23 nt, Artificial sequence
  Synthetic oligonucleotide
cggucauugagcauggcuuccac

SEQ ID NO: 546 - RNA, 23 nt, Artificial sequence
  Synthetic oligonucleotide
acucuggccaugugugucuccac

SEQ ID NO: 547 - RNA, 23 nt, Artificial sequence
  Synthetic oligonucleotide
uucuccagggccaggcggcggcg

SEQ ID NO: 548 - RNA, 23 nt, Artificial sequence
  Synthetic oligonucleotide
aucacaaaguggggaugggucuu

SEQ ID NO: 549 - RNA, 23 nt, Artificial sequence
  Synthetic oligonucleotide
gccugcagagcggugauguaguu

SEQ ID NO: 550 - RNA, 23 nt, Artificial sequence
  Synthetic oligonucleotide
ugacgaggccgaggaggaacagc

SEQ ID NO: 551 - RNA, 23 nt, Artificial sequence
  Synthetic oligonucleotide
agggcaucacuuacaaacucacc

SEQ ID NO: 552 - RNA, 23 nt, Artificial sequence
  Synthetic oligonucleotide
ccaacuaagcagcgguagggaau

SEQ ID NO: 553 - RNA, 23 nt, Artificial sequence
  Synthetic oligonucleotide
auccucuccugguguaagaauuu

SEQ ID NO: 554 - RNA, 23 nt, Artificial sequence
  Synthetic oligonucleotide
uugcacuugucaggaacgagaag

SEQ ID NO: 555 - RNA, 23 nt, Artificial sequence
  Synthetic oligonucleotide
agaugaguuucgcaaacauccau

SEQ ID NO: 556 - RNA, 23 nt, Artificial sequence
  Synthetic oligonucleotide
uucuuuagcauauugaacacgug

SEQ ID NO: 557 - RNA, 23 nt, Artificial sequence
  Synthetic oligonucleotide
uucuguucugcgcggacauacuu

SEQ ID NO: 558 - RNA, 23 nt, Artificial sequence
  Synthetic oligonucleotide
uuggcgacggugugccagugaag

SEQ ID NO: 559 - RNA, 23 nt, Artificial sequence
  Synthetic oligonucleotide
cucuucucacugcaugucucuuu

SEQ ID NO: 560 - RNA, 23 nt, Artificial sequence
  Synthetic oligonucleotide
uuuagggugugcugucuguccuu

SEQ ID NO: 561 - RNA, 23 nt, Artificial sequence
  Synthetic oligonucleotide
augcgcacaugcucgaaaugcuu

SEQ ID NO: 562 - RNA, 23 nt, Artificial sequence
  Synthetic oligonucleotide
gcggcuuucuugggauccaccau

SEQ ID NO: 563 - RNA, 23 nt, Artificial sequence
  Synthetic oligonucleotide
auaaccugggaccggaucugagc

SEQ ID NO: 564 - RNA, 23 nt, Artificial sequence
  Synthetic oligonucleotide
uaaaucacacggaggugugucau

SEQ ID NO: 565 - RNA, 23 nt, Artificial sequence
  Synthetic oligonucleotide
agagacugauucaugcgcucaua

SEQ ID NO: 566 - RNA, 23 nt, Artificial sequence
  Synthetic oligonucleotide
ggcacguuguagagcagggagag

SEQ ID NO: 567 - RNA, 23 nt, Artificial sequence
  Synthetic oligonucleotide
ugaaucuccucggccacugcagg

SEQ ID NO: 568 - RNA, 23 nt, Artificial sequence
  Synthetic oligonucleotide
agcagcucaucaacuucauccug

SEQ ID NO: 569 - RNA, 23 nt, Artificial sequence
  Synthetic oligonucleotide
gaauaguuuugcucuuucugaag

SEQ ID NO: 570 - RNA, 23 nt, Artificial sequence
  Synthetic oligonucleotide
auguuggccaagacgucaucuga

SEQ ID NO: 571 - RNA, 23 nt, Artificial sequence
  Synthetic oligonucleotide
cugauccuugguucacuaaucau

SEQ ID NO: 572 - RNA, 23 nt, Artificial sequence
  Synthetic oligonucleotide
augagagcaucguuuccguaacu

SEQ ID NO: 573 - RNA, 23 nt, Artificial sequence
  Synthetic oligonucleotide
ggaaggagcuccacggugguuuu

SEQ ID NO: 574 - RNA, 23 nt, Artificial sequence
  Synthetic oligonucleotide
uucguuucggucaaagauggcau

SEQ ID NO: 575 - RNA, 23 nt, Artificial sequence
  Synthetic oligonucleotide
ugccacggcuggagaucguccag

SEQ ID NO: 576 - RNA, 23 nt, Artificial sequence
  Synthetic oligonucleotide
aggcugaacucuccauucacggg

SEQ ID NO: 577 - RNA, 23 nt, Artificial sequence
  Synthetic oligonucleotide
acagagucagccccaaaagaaug

SEQ ID NO: 578 - RNA, 23 nt, Artificial sequence
  Synthetic oligonucleotide
ucguuuucuguguuggcuggcac

SEQ ID NO: 579 - RNA, 23 nt, Artificial sequence
  Synthetic oligonucleotide
cgggcaucaacaggcucaacuuc

SEQ ID NO: 580 - RNA, 23 nt, Artificial sequence
  Synthetic oligonucleotide
ccagaaccuggucgaguggucag

SEQ ID NO: 581 - RNA, 23 nt, Artificial sequence
  Synthetic oligonucleotide
aguccucggucggcagcagggcg

SEQ ID NO: 582 - RNA, 23 nt, Artificial sequence
  Synthetic oligonucleotide
ccguagucaugcaaguugguacu

SEQ ID NO: 583 - RNA, 23 nt, Artificial sequence
  Synthetic oligonucleotide
auuccgcagggcagcaacaugcc

SEQ ID NO: 584 - RNA, 23 nt, Artificial sequence
  Synthetic oligonucleotide
ucuaccccucggaacuugucaau

SEQ ID NO: 585 - RNA, 23 nt, Artificial sequence
  Synthetic oligonucleotide
uccgucuugauauuugucaaccc

SEQ ID NO: 586 - RNA, 23 nt, Artificial sequence
  Synthetic oligonucleotide
aucuucacuucagagaucuccuc

SEQ ID NO: 587 - RNA, 23 nt, Artificial sequence
  Synthetic oligonucleotide
uccacauugucacuuucuucagc

SEQ ID NO: 588 - RNA, 23 nt, Artificial sequence
  Synthetic oligonucleotide
ucaugucggaauucugcauccau

SEQ ID NO: 589 - RNA, 23 nt, Artificial sequence
  Synthetic oligonucleotide
gccagugggcaacacacaaacuc

SEQ ID NO: 590 - RNA, 23 nt, Artificial sequence
  Synthetic oligonucleotide
ugaugaacuucauauccugaguc

SEQ ID NO: 591 - RNA, 23 nt, Artificial sequence
  Synthetic oligonucleotide
gcaaagaacaccaauuuuugaug

SEQ ID NO: 592 - RNA, 23 nt, Artificial sequence
  Synthetic oligonucleotide
uccuccuccgcaucagcagaauc

SEQ ID NO: 593 - RNA, 23 nt, Artificial sequence
  Synthetic oligonucleotide
uuguuugaacccacaucuucugc

SEQ ID NO: 594 - RNA, 23 nt, Artificial sequence
  Synthetic oligonucleotide
ccccaccagacauccgagucauc

SEQ ID NO: 595 - RNA, 23 nt, Artificial sequence
  Synthetic oligonucleotide
augaguccaaugauugcaccuuu

SEQ ID NO: 596 - RNA, 23 nt, Artificial sequence
  Synthetic oligonucleotide
gcuaugacaacaccgcccaccau

SEQ ID NO: 597 - RNA, 23 nt, Artificial sequence
  Synthetic oligonucleotide
uguuucuucuucagcaucaccaa

SEQ ID NO: 598 - RNA, 23 nt, Artificial sequence
  Synthetic oligonucleotide
aaggugaugacgaucacugucgc

SEQ ID NO: 599 - RNA, 23 nt, Artificial sequence
  Synthetic oligonucleotide
gcauagucugugucugcuccgcc

SEQ ID NO: 600 - RNA, 23 nt, Artificial sequence
  Synthetic oligonucleotide
ccaugaugaauggauguguacug

SEQ ID NO: 601 - RNA, 23 nt, Artificial sequence
  Synthetic oligonucleotide
gcggcgucaaccuccaccacacc

SEQ ID NO: 602 - RNA, 23 nt, Artificial sequence
  Synthetic oligonucleotide
uggcgcuccucuggggugacagc

SEQ ID NO: 603 - RNA, 23 nt, Artificial sequence
  Synthetic oligonucleotide
uagguuggauuuucguagccguu

SEQ ID NO: 604 - RNA, 23 nt, Artificial sequence
  Synthetic oligonucleotide
acuuugucuucacucccaucugc

SEQ ID NO: 605 - RNA, 23 nt, Artificial sequence
  Synthetic oligonucleotide
uucugcugcaucuuggacaggug

SEQ ID NO: 606 - RNA, 23 nt, Artificial sequence
  Synthetic oligonucleotide
uccuccucugcuacuucuacuac

SEQ ID NO: 607 - RNA, 23 nt, Artificial sequence
  Synthetic oligonucleotide
ugcaucugcucaaagaacuugua

SEQ ID NO: 608 - RNA, 23 nt, Artificial sequence
  Synthetic oligonucleotide
gcuguggcgggggucuaguucug

SEQ ID NO: 609 - RNA, 23 nt, Artificial sequence
  Synthetic oligonucleotide
ugcuguccaacuucagaggcugc

SEQ ID NO: 610 - RNA, 23 nt, Artificial sequence
  Synthetic oligonucleotide
ucgucaucaucggcuucuucuuc

SEQ ID NO: 611 - RNA, 23 nt, Artificial sequence
  Synthetic oligonucleotide
ucuuccaccucagccacuucuuc

SEQ ID NO: 612 - RNA, 23 nt, Artificial sequence
  Synthetic oligonucleotide
uggguagugaagcaaugguuuug

SEQ ID NO: 613 - RNA, 23 nt, Artificial sequence
  Synthetic oligonucleotide
uauucuauaaauggacaccgaug

SEQ ID NO: 614 - RNA, 23 nt, Artificial sequence
  Synthetic oligonucleotide
acagcacagcugucaaaaggcga

SEQ ID NO: 615 - RNA, 23 nt, Artificial sequence
  Synthetic oligonucleotide
gauaaugaguaaaucauaaaacg

SEQ ID NO: 616 - RNA, 23 nt, Artificial sequence
  Synthetic oligonucleotide
cggguuuguuucuucccacauua

SEQ ID NO: 617 - RNA, 23 nt, Artificial sequence
  Synthetic oligonucleotide
guucaggcaucuacuuguguuac

SEQ ID NO: 618 - RNA, 23 nt, Artificial sequence
  Synthetic oligonucleotide
uccucagccucuuccucuaccuc

SEQ ID NO: 619 - RNA, 23 nt, Artificial sequence
  Synthetic oligonucleotide
ucuguggcuucuucguaggguuc

SEQ ID NO: 620 - RNA, 23 nt, Artificial sequence
  Synthetic oligonucleotide
aaagagagauagaauacauuacu

SEQ ID NO: 621 - RNA, 23 nt, Artificial sequence
  Synthetic oligonucleotide
cugauguguggauuaauucaagu

SEQ ID NO: 622 - RNA, 23 nt, Artificial sequence
  Synthetic oligonucleotide
guggcaaugcuggugguucucuc

SEQ ID NO: 623 - RNA, 23 nt, Artificial sequence
  Synthetic oligonucleotide
guaguauagagaccaaaauguaa

SEQ ID NO: 624 - RNA, 23 nt, Artificial sequence
  Synthetic oligonucleotide
ucaucaccauccucaucguccuc

SEQ ID NO: 625 - RNA, 23 nt, Artificial sequence
  Synthetic oligonucleotide
uacacaaaacccauuaauaaugu

SEQ ID NO: 626 - RNA, 23 nt, Artificial sequence
  Synthetic oligonucleotide
auacagcuaaauucuuuacagua

SEQ ID NO: 627 - RNA, 23 nt, Artificial sequence
  Synthetic oligonucleotide
ucugugguggugguggugguggu

SEQ ID NO: 628 - RNA, 23 nt, Artificial sequence
  Synthetic oligonucleotide
aucuauucaugcacuaguuugau

SEQ ID NO: 629 - RNA, 23 nt, Artificial sequence
  Synthetic oligonucleotide
cgaaccaccucuuccacagacuc

SEQ ID NO: 630 - RNA, 23 nt, Artificial sequence
  Synthetic oligonucleotide
gugauaaauaaucaggagagaau

SEQ ID NO: 631 - RNA, 23 nt, Artificial sequence
  Synthetic oligonucleotide
ucacaaaccacaagaauaauaua

SEQ ID NO: 632 - RNA, 23 nt, Artificial sequence
  Synthetic oligonucleotide
uacaacuggcuaaggggcuaugu

SEQ ID NO: 633 - RNA, 23 nt, Artificial sequence
  Synthetic oligonucleotide
guaaaguaggacuuaauuggguc

SEQ ID NO: 634 - RNA, 23 nt, Artificial sequence
  Synthetic oligonucleotide
ccaucgauucuuaaagcauaugu

SEQ ID NO: 635 - RNA, 23 nt, Artificial sequence
  Synthetic oligonucleotide
cacguucacaugaagcauccccc

SEQ ID NO: 636 - RNA, 23 nt, Artificial sequence
  Synthetic oligonucleotide
caagagaagcagcugaacuccca

SEQ ID NO: 637 - RNA, 23 nt, Artificial sequence
  Synthetic oligonucleotide
aucaggaaaggaauacuuaggca

SEQ ID NO: 638 - RNA, 23 nt, Artificial sequence
  Synthetic oligonucleotide
aucugaaauacuuaaaaauguuu

SEQ ID NO: 639 - RNA, 23 nt, Artificial sequence
  Synthetic oligonucleotide
uuaacuuuaaaaugcauagugau

SEQ ID NO: 640 - RNA, 23 nt, Artificial sequence
  Synthetic oligonucleotide
gaaaaaaaaucucucuaaagcau

SEQ ID NO: 641 - RNA, 23 nt, Artificial sequence
  Synthetic oligonucleotide
guacaguaaaaugcagucaugga

SEQ ID NO: 642 - RNA, 23 nt, Artificial sequence
  Synthetic oligonucleotide
auauagcagaagcagcaaucugu

SEQ ID NO: 643 - RNA, 23 nt, Artificial sequence
  Synthetic oligonucleotide
cucuuaauuccuauaucacaaau

SEQ ID NO: 644 - RNA, 23 nt, Artificial sequence
  Synthetic oligonucleotide
gaagaaacaaacguguguauccu

SEQ ID NO: 645 - RNA, 23 nt, Artificial sequence
  Synthetic oligonucleotide
gugugcacauaaaacaggcacga

SEQ ID NO: 646 - RNA, 23 nt, Artificial sequence
  Synthetic oligonucleotide
cuugaagucucaaugccuaaugu

SEQ ID NO: 647 - RNA, 23 nt, Artificial sequence
  Synthetic oligonucleotide
acguggacaaaaaaagaaaagcu

SEQ ID NO: 648 - RNA, 23 nt, Artificial sequence
  Synthetic oligonucleotide
cuuuaucaaagacccaaagauac

SEQ ID NO: 649 - RNA, 23 nt, Artificial sequence
  Synthetic oligonucleotide
accagcagagcaccccuccccac

SEQ ID NO: 650 - RNA, 23 nt, Artificial sequence
  Synthetic oligonucleotide
acccgccccguaaaagugcuuac

SEQ ID NO: 651 - RNA, 23 nt, Artificial sequence
  Synthetic oligonucleotide
acaaugaacagggauucuuuucu

SEQ ID NO: 652 - RNA, 23 nt, Artificial sequence
  Synthetic oligonucleotide
gagaauucuugguaauugaagac

SEQ ID NO: 653 - RNA, 23 nt, Artificial sequence
  Synthetic oligonucleotide
ccucucgaaccaccucuuccaca

SEQ ID NO: 654 - RNA, 23 nt, Artificial sequence
  Synthetic oligonucleotide
ucucggcuuguucagagcacacc

SEQ ID NO: 655 - RNA, 23 nt, Artificial sequence
  Synthetic oligonucleotide
ucauugcucggcacggccccguc

SEQ ID NO: 656 - RNA, 23 nt, Artificial sequence
  Synthetic oligonucleotide
caucaaaguaccagcgggagauc

SEQ ID NO: 657 - RNA, 23 nt, Artificial sequence
  Synthetic oligonucleotide
gggcacacuucccuucagucaca

SEQ ID NO: 658 - RNA, 23 nt, Artificial sequence
  Synthetic oligonucleotide
ccaugcaguacucuucuguguca

SEQ ID NO: 659 - RNA, 23 nt, Artificial sequence
  Synthetic oligonucleotide
cacauccgccguaaaagaauggg

SEQ ID NO: 660 - RNA, 23 nt, Artificial sequence
  Synthetic oligonucleotide
acauggcgcugccacacacggcc

SEQ ID NO: 661 - RNA, 23 nt, Artificial sequence
  Synthetic oligonucleotide
caaaguuguuccgguugccgcca

SEQ ID NO: 662 - RNA, 23 nt, Artificial sequence
  Synthetic oligonucleotide
cucgggcaagagguuccugggua

SEQ ID NO: 663 - RNA, 23 nt, Artificial sequence
  Synthetic oligonucleotide
uagucuugaguaaacuuugggac

SEQ ID NO: 664 - RNA, 23 nt, Artificial sequence
  Synthetic oligonucleotide
acuggcugcuguuguaggaaguu

SEQ ID NO: 665 - RNA, 23 nt, Artificial sequence
  Synthetic oligonucleotide
uuguaggaaguuuaacaggaucu

SEQ ID NO: 666 - RNA, 21 nt, Artificial sequence
  Synthetic oligonucleotide
gcugcccgguuuggcacugcu

SEQ ID NO: 667 - RNA, 21 nt, Artificial sequence
  Synthetic oligonucleotide
ugccccgcgcagggucgcgau

SEQ ID NO: 668 - RNA, 21 nt, Artificial sequence
  Synthetic oligonucleotide
ccugcuggccgccuggacggc

SEQ ID NO: 669 - RNA, 21 nt, Artificial sequence
  Synthetic oligonucleotide
uaccccugaugccguugacaa

SEQ ID NO: 670 - RNA, 21 nt, Artificial sequence
  Synthetic oligonucleotide
ugagaaugaacaugcccauuu

SEQ ID NO: 671 - RNA, 21 nt, Artificial sequence
  Synthetic oligonucleotide
guaucucgagacaccugggga

SEQ ID NO: 672 - RNA, 21 nt, Artificial sequence
  Synthetic oligonucleotide
ccagaaagccaaagagaggcu

SEQ ID NO: 673 - RNA, 21 nt, Artificial sequence
  Synthetic oligonucleotide
ugaggccaagcaccgagagag

SEQ ID NO: 674 - RNA, 21 nt, Artificial sequence
  Synthetic oligonucleotide
ugaugguaaugcuggccugcu

SEQ ID NO: 675 - RNA, 21 nt, Artificial sequence
  Synthetic oligonucleotide
ucgggcgcuggagguacccac

SEQ ID NO: 676 - RNA, 21 nt, Artificial sequence
  Synthetic oligonucleotide
gcacaugaauguccagaaugg

SEQ ID NO: 677 - RNA, 21 nt, Artificial sequence
  Synthetic oligonucleotide
guucuguggcagacugaacau

SEQ ID NO: 678 - RNA, 21 nt, Artificial sequence
  Synthetic oligonucleotide
ggcugaaccccagauugccau

SEQ ID NO: 679 - RNA, 21 nt, Artificial sequence
  Synthetic oligonucleotide
aaugucccaggucaugagaga

SEQ ID NO: 680 - RNA, 21 nt, Artificial sequence
  Synthetic oligonucleotide
augggaagaggcagaacguca

SEQ ID NO: 681 - RNA, 21 nt, Artificial sequence
  Synthetic oligonucleotide
agcaaagaacuugccuaaagc

SEQ ID NO: 682 - RNA, 21 nt, Artificial sequence
  Synthetic oligonucleotide
gaagugggauucagauccauc

SEQ ID NO: 683 - RNA, 21 nt, Artificial sequence
  Synthetic oligonucleotide
ugauaagaaggcaguuaucca

SEQ ID NO: 684 - RNA, 21 nt, Artificial sequence
  Synthetic oligonucleotide
gcauuuccaggagaaagugga

SEQ ID NO: 685 - RNA, 21 nt, Artificial sequence
  Synthetic oligonucleotide
aucuuuggaacaggaagcagc

SEQ ID NO: 686 - RNA, 21 nt, Artificial sequence
  Synthetic oligonucleotide
agggaccaaaaccugcauuga

SEQ ID NO: 687 - RNA, 21 nt, Artificial sequence
  Synthetic oligonucleotide
guauugccaagaagucuaccc

SEQ ID NO: 688 - RNA, 21 nt, Artificial sequence
  Synthetic oligonucleotide
uaccaaggaaggcauccugca

SEQ ID NO: 689 - RNA, 21 nt, Artificial sequence
  Synthetic oligonucleotide
ugaacugcagaucaccaaugu

SEQ ID NO: 690 - RNA, 21 nt, Artificial sequence
  Synthetic oligonucleotide
gguagaagccaaccaaccagu

SEQ ID NO: 691 - RNA, 21 nt, Artificial sequence
  Synthetic oligonucleotide
caacgagagacagcagcuggu

SEQ ID NO: 692 - RNA, 21 nt, Artificial sequence
  Synthetic oligonucleotide
gaccauccagaacuggugcaa

SEQ ID NO: 693 - RNA, 21 nt, Artificial sequence
  Synthetic oligonucleotide
gcggggccgcaagcagugcaa

SEQ ID NO: 694 - RNA, 21 nt, Artificial sequence
  Synthetic oligonucleotide
ggaagccaugcucaaugaccg

SEQ ID NO: 695 - RNA, 21 nt, Artificial sequence
  Synthetic oligonucleotide
ggagacacacauggccagagu

SEQ ID NO: 696 - RNA, 21 nt, Artificial sequence
  Synthetic oligonucleotide
ccgccgccuggcccuggagaa

SEQ ID NO: 697 - RNA, 21 nt, Artificial sequence
  Synthetic oligonucleotide
gacccauccccacuuugugau

SEQ ID NO: 698 - RNA, 21 nt, Artificial sequence
  Synthetic oligonucleotide
cuacaucaccgcucugcaggc

SEQ ID NO: 699 - RNA, 21 nt, Artificial sequence
  Synthetic oligonucleotide
uguuccuccucggccucguca

SEQ ID NO: 700 - RNA, 21 nt, Artificial sequence
  Synthetic oligonucleotide
ugaguuuguaagugaugcccu

SEQ ID NO: 701 - RNA, 21 nt, Artificial sequence
  Synthetic oligonucleotide
ucccuaccgcugcuuaguugg

SEQ ID NO: 702 - RNA, 21 nt, Artificial sequence
  Synthetic oligonucleotide
auucuuacaccaggagaggau

SEQ ID NO: 703 - RNA, 21 nt, Artificial sequence
  Synthetic oligonucleotide
ucucguuccugacaagugcaa

SEQ ID NO: 704 - RNA, 21 nt, Artificial sequence
  Synthetic oligonucleotide
ggauguuugcgaaacucaucu

SEQ ID NO: 705 - RNA, 21 nt, Artificial sequence
  Synthetic oligonucleotide
cguguucaauaugcuaaagaa

SEQ ID NO: 706 - RNA, 21 nt, Artificial sequence
  Synthetic oligonucleotide
guauguccgcgcagaacagaa

SEQ ID NO: 707 - RNA, 21 nt, Artificial sequence
  Synthetic oligonucleotide
ucacuggcacaccgucgccaa

SEQ ID NO: 708 - RNA, 21 nt, Artificial sequence
  Synthetic oligonucleotide
agagacaugcagugagaagag

SEQ ID NO: 709 - RNA, 21 nt, Artificial sequence
  Synthetic oligonucleotide
ggacagacagcacacccuaaa

SEQ ID NO: 710 - RNA, 21 nt, Artificial sequence
  Synthetic oligonucleotide
gcauuucgagcaugugcgcau

SEQ ID NO: 711 - RNA, 21 nt, Artificial sequence
  Synthetic oligonucleotide
gguggaucccaagaaagccgc

SEQ ID NO: 712 - RNA, 21 nt, Artificial sequence
  Synthetic oligonucleotide
ucagauccggucccagguuau

SEQ ID NO: 713 - RNA, 21 nt, Artificial sequence
  Synthetic oligonucleotide
gacacaccuccgugugauuua

SEQ ID NO: 714 - RNA, 21 nt, Artificial sequence
  Synthetic oligonucleotide
ugagcgcaugaaucagucucu

SEQ ID NO: 715 - RNA, 21 nt, Artificial sequence
  Synthetic oligonucleotide
cucccugcucuacaacgugcc

SEQ ID NO: 716 - RNA, 21 nt, Artificial sequence
  Synthetic oligonucleotide
ugcaguggccgaggagauuca

SEQ ID NO: 717 - RNA, 21 nt, Artificial sequence
  Synthetic oligonucleotide
ggaugaaguugaugagcugcu

SEQ ID NO: 718 - RNA, 21 nt, Artificial sequence
  Synthetic oligonucleotide
ucagaaagagcaaaacuauuc

SEQ ID NO: 719 - RNA, 21 nt, Artificial sequence
  Synthetic oligonucleotide
agaugacgucuuggccaacau

SEQ ID NO: 720 - RNA, 21 nt, Artificial sequence
  Synthetic oligonucleotide
gauuagugaaccaaggaucag

SEQ ID NO: 721 - RNA, 21 nt, Artificial sequence
  Synthetic oligonucleotide
uuacggaaacgaugcucucau

SEQ ID NO: 722 - RNA, 21 nt, Artificial sequence
  Synthetic oligonucleotide
aaccaccguggagcuccuucc

SEQ ID NO: 723 - RNA, 21 nt, Artificial sequence
  Synthetic oligonucleotide
gccaucuuugaccgaaacgaa

SEQ ID NO: 724 - RNA, 21 nt, Artificial sequence
  Synthetic oligonucleotide
ggacgaucuccagccguggca

SEQ ID NO: 725 - RNA, 21 nt, Artificial sequence
  Synthetic oligonucleotide
cgugaauggagaguucagccu

SEQ ID NO: 726 - RNA, 21 nt, Artificial sequence
  Synthetic oligonucleotide
uucuuuuggggcugacucugu

SEQ ID NO: 727 - RNA, 21 nt, Artificial sequence
  Synthetic oligonucleotide
gccagccaacacagaaaacga

SEQ ID NO: 728 - RNA, 21 nt, Artificial sequence
  Synthetic oligonucleotide
aguugagccuguugaugcccg

SEQ ID NO: 729 - RNA, 21 nt, Artificial sequence
  Synthetic oligonucleotide
gaccacucgaccagguucugg

SEQ ID NO: 730 - RNA, 21 nt, Artificial sequence
  Synthetic oligonucleotide
cccugcugccgaccgaggacu

SEQ ID NO: 731 - RNA, 21 nt, Artificial sequence
  Synthetic oligonucleotide
uaccaacuugcaugacuacgg

SEQ ID NO: 732 - RNA, 21 nt, Artificial sequence
  Synthetic oligonucleotide
cauguugcugcccugcggaau

SEQ ID NO: 733 - RNA, 21 nt, Artificial sequence
  Synthetic oligonucleotide
ugacaaguuccgagggguaga

SEQ ID NO: 734 - RNA, 21 nt, Artificial sequence
  Synthetic oligonucleotide
guugacaaauaucaagacgga

SEQ ID NO: 735 - RNA, 21 nt, Artificial sequence
  Synthetic oligonucleotide
ggagaucucugaagugaagau

SEQ ID NO: 736 - RNA, 21 nt, Artificial sequence
  Synthetic oligonucleotide
ugaagaaagugacaaugugga

SEQ ID NO: 737 - RNA, 21 nt, Artificial sequence
  Synthetic oligonucleotide
ggaugcagaauuccgacauga

SEQ ID NO: 738 - RNA, 21 nt, Artificial sequence
  Synthetic oligonucleotide
guuuguguguugcccacuggc

SEQ ID NO: 739 - RNA, 21 nt, Artificial sequence
  Synthetic oligonucleotide
cucaggauaugaaguucauca

SEQ ID NO: 740 - RNA, 21 nt, Artificial sequence
  Synthetic oligonucleotide
ucaaaaauugguguucuuugc

SEQ ID NO: 741 - RNA, 21 nt, Artificial sequence
  Synthetic oligonucleotide
uucugcugaugcggaggagga

SEQ ID NO: 742 - RNA, 21 nt, Artificial sequence
  Synthetic oligonucleotide
agaagauguggguucaaacaa

SEQ ID NO: 743 - RNA, 21 nt, Artificial sequence
  Synthetic oligonucleotide
ugacucggaugucuggugggg

SEQ ID NO: 744 - RNA, 21 nt, Artificial sequence
  Synthetic oligonucleotide
aggugcaaucauuggacucau

SEQ ID NO: 745 - RNA, 21 nt, Artificial sequence
  Synthetic oligonucleotide
ggugggcgguguugucauagc

SEQ ID NO: 746 - RNA, 21 nt, Artificial sequence
  Synthetic oligonucleotide
ggugaugcugaagaagaaaca

SEQ ID NO: 747 - RNA, 21 nt, Artificial sequence
  Synthetic oligonucleotide
gacagugaucgucaucaccuu

SEQ ID NO: 748 - RNA, 21 nt, Artificial sequence
  Synthetic oligonucleotide
cggagcagacacagacuaugc

SEQ ID NO: 749 - RNA, 21 nt, Artificial sequence
  Synthetic oligonucleotide
guacacauccauucaucaugg

SEQ ID NO: 750 - RNA, 21 nt, Artificial sequence
  Synthetic oligonucleotide
ugugguggagguugacgccgc

SEQ ID NO: 751 - RNA, 21 nt, Artificial sequence
  Synthetic oligonucleotide
ugucaccccagaggagcgcca

SEQ ID NO: 752 - RNA, 21 nt, Artificial sequence
  Synthetic oligonucleotide
cggcuacgaaaauccaaccua

SEQ ID NO: 753 - RNA, 21 nt, Artificial sequence
  Synthetic oligonucleotide
agaugggagugaagacaaagu

SEQ ID NO: 754 - RNA, 21 nt, Artificial sequence
  Synthetic oligonucleotide
ccuguccaagaugcagcagaa

SEQ ID NO: 755 - RNA, 21 nt, Artificial sequence
  Synthetic oligonucleotide
aguagaaguagcagaggagga

SEQ ID NO: 756 - RNA, 21 nt, Artificial sequence
  Synthetic oligonucleotide
caaguucuuugagcagaugca

SEQ ID NO: 757 - RNA, 21 nt, Artificial sequence
  Synthetic oligonucleotide
gaacuagacccccgccacagc

SEQ ID NO: 758 - RNA, 21 nt, Artificial sequence
  Synthetic oligonucleotide
agccucugaaguuggacagca

SEQ ID NO: 759 - RNA, 21 nt, Artificial sequence
  Synthetic oligonucleotide
agaagaagccgaugaugacga

SEQ ID NO: 760 - RNA, 21 nt, Artificial sequence
  Synthetic oligonucleotide
agaaguggcugagguggaaga

SEQ ID NO: 761 - RNA, 21 nt, Artificial sequence
  Synthetic oligonucleotide
aaaccauugcuucacuaccca

SEQ ID NO: 762 - RNA, 21 nt, Artificial sequence
  Synthetic oligonucleotide
ucgguguccauuuauagaaua

SEQ ID NO: 763 - RNA, 21 nt, Artificial sequence
  Synthetic oligonucleotide
gccuuuugacagcugugcugu

SEQ ID NO: 764 - RNA, 21 nt, Artificial sequence
  Synthetic oligonucleotide
uuuuaugauuuacucauuauc

SEQ ID NO: 765 - RNA, 21 nt, Artificial sequence
  Synthetic oligonucleotide
augugggaagaaacaaacccg

SEQ ID NO: 766 - RNA, 21 nt, Artificial sequence
  Synthetic oligonucleotide
aacacaaguagaugccugaac

SEQ ID NO: 767 - RNA, 21 nt, Artificial sequence
  Synthetic oligonucleotide
gguagaggaagaggcugagga

SEQ ID NO: 768 - RNA, 21 nt, Artificial sequence
  Synthetic oligonucleotide
acccuacgaagaagccacaga

SEQ ID NO: 769 - RNA, 21 nt, Artificial sequence
  Synthetic oligonucleotide
uaauguauucuaucucucuuu

SEQ ID NO: 770 - RNA, 21 nt, Artificial sequence
  Synthetic oligonucleotide
uugaauuaauccacacaucag

SEQ ID NO: 771 - RNA, 21 nt, Artificial sequence
  Synthetic oligonucleotide
gagaaccaccagcauugccac

SEQ ID NO: 772 - RNA, 21 nt, Artificial sequence
  Synthetic oligonucleotide
acauuuuggucucuauacuac

SEQ ID NO: 773 - RNA, 21 nt, Artificial sequence
  Synthetic oligonucleotide
ggacgaugaggauggugauga

SEQ ID NO: 774 - RNA, 21 nt, Artificial sequence
  Synthetic oligonucleotide
auuauuaauggguuuugugua

SEQ ID NO: 775 - RNA, 21 nt, Artificial sequence
  Synthetic oligonucleotide
cuguaaagaauuuagcuguau

SEQ ID NO: 776 - RNA, 21 nt, Artificial sequence
  Synthetic oligonucleotide
caccaccaccaccaccacaga

SEQ ID NO: 777 - RNA, 21 nt, Artificial sequence
  Synthetic oligonucleotide
caaacuagugcaugaauagau

SEQ ID NO: 778 - RNA, 21 nt, Artificial sequence
  Synthetic oligonucleotide
gucuguggaagaggugguucg

SEQ ID NO: 779 - RNA, 21 nt, Artificial sequence
  Synthetic oligonucleotide
ucucuccugauuauuuaucac

SEQ ID NO: 780 - RNA, 21 nt, Artificial sequence
  Synthetic oligonucleotide
uauuauucuugugguuuguga

SEQ ID NO: 781 - RNA, 21 nt, Artificial sequence
  Synthetic oligonucleotide
auagccccuuagccaguugua

SEQ ID NO: 782 - RNA, 21 nt, Artificial sequence
  Synthetic oligonucleotide
cccaauuaaguccuacuuuac

SEQ ID NO: 783 - RNA, 21 nt, Artificial sequence
  Synthetic oligonucleotide
auaugcuuuaagaaucgaugg

SEQ ID NO: 784 - RNA, 21 nt, Artificial sequence
  Synthetic oligonucleotide
gggaugcuucaugugaacgug

SEQ ID NO: 785 - RNA, 21 nt, Artificial sequence
  Synthetic oligonucleotide
ggaguucagcugcuucucuug

SEQ ID NO: 786 - RNA, 21 nt, Artificial sequence
  Synthetic oligonucleotide
ccuaaguauuccuuuccugau

SEQ ID NO: 787 - RNA, 21 nt, Artificial sequence
  Synthetic oligonucleotide
acauuuuuaaguauuucagau

SEQ ID NO: 788 - RNA, 21 nt, Artificial sequence
  Synthetic oligonucleotide
cacuaugcauuuuaaaguuaa

SEQ ID NO: 789 - RNA, 21 nt, Artificial sequence
  Synthetic oligonucleotide
gcuuuagagagauuuuuuuuc

SEQ ID NO: 790 - RNA, 21 nt, Artificial sequence
  Synthetic oligonucleotide
caugacugcauuuuacuguac

SEQ ID NO: 791 - RNA, 21 nt, Artificial sequence
  Synthetic oligonucleotide
agauugcugcuucugcuauau

SEQ ID NO: 792 - RNA, 21 nt, Artificial sequence
  Synthetic oligonucleotide
uugugauauaggaauuaagag

SEQ ID NO: 793 - RNA, 21 nt, Artificial sequence
  Synthetic oligonucleotide
gauacacacguuuguuucuuc

SEQ ID NO: 794 - RNA, 21 nt, Artificial sequence
  Synthetic oligonucleotide
gugccuguuuuaugugcacac

SEQ ID NO: 795 - RNA, 21 nt, Artificial sequence
  Synthetic oligonucleotide
auuaggcauugagacuucaag

SEQ ID NO: 796 - RNA, 21 nt, Artificial sequence
  Synthetic oligonucleotide
cuuuucuuuuuuuguccacgu

SEQ ID NO: 797 - RNA, 21 nt, Artificial sequence
  Synthetic oligonucleotide
aucuuugggucuuugauaaag

SEQ ID NO: 798 - RNA, 21 nt, Artificial sequence
  Synthetic oligonucleotide
ggggaggggugcucugcuggu

SEQ ID NO: 799 - RNA, 21 nt, Artificial sequence
  Synthetic oligonucleotide
aagcacuuuuacggggcgggu

SEQ ID NO: 800 - RNA, 21 nt, Artificial sequence
  Synthetic oligonucleotide
aaaagaaucccuguucauugu

SEQ ID NO: 801 - RNA, 21 nt, Artificial sequence
  Synthetic oligonucleotide
cuucaauuaccaagaauucuc

SEQ ID NO: 802 - RNA, 21 nt, Artificial sequence
  Synthetic oligonucleotide
uggaagaggugguucgagagg

SEQ ID NO: 803 - RNA, 21 nt, Artificial sequence
  Synthetic oligonucleotide
ugugcucugaacaagccgaga

SEQ ID NO: 804 - RNA, 21 nt, Artificial sequence
  Synthetic oligonucleotide
cggggccgugccgagcaauga

SEQ ID NO: 805 - RNA, 21 nt, Artificial sequence
  Synthetic oligonucleotide
ucucccgcugguacuuugaug

SEQ ID NO: 806 - RNA, 21 nt, Artificial sequence
  Synthetic oligonucleotide
ugacugaagggaagugugccc

SEQ ID NO: 807 - RNA, 21 nt, Artificial sequence
  Synthetic oligonucleotide
acacagaagaguacugcaugg

SEQ ID NO: 808 - RNA, 21 nt, Artificial sequence
  Synthetic oligonucleotide
cauucuuuuacggcggaugug

SEQ ID NO: 809 - RNA, 21 nt, Artificial sequence
  Synthetic oligonucleotide
ccguguguggcagcgccaugu

SEQ ID NO: 810 - RNA, 21 nt, Artificial sequence
  Synthetic oligonucleotide
gcggcaaccggaacaacuuug

SEQ ID NO: 811 - RNA, 21 nt, Artificial sequence
  Synthetic oligonucleotide
cccaggaaccucuugcccgag

SEQ ID NO: 812 - RNA, 21 nt, Artificial sequence
  Synthetic oligonucleotide
cccaaaguuuacucaagacua

SEQ ID NO: 813 - RNA, 21 nt, Artificial sequence
  Synthetic oligonucleotide
cuuccuacaacagcagccagu

SEQ ID NO: 814 - RNA, 21 nt, Artificial sequence
  Synthetic oligonucleotide
auccuguuaaacuuccuacaa

SEQ ID NO: 815 - RNA, 23 nt, Artificial sequence
  Synthetic oligonucleotide
gccgucucccggggcccccgcgc

SEQ ID NO: 816 - RNA, 23 nt, Artificial sequence
  Synthetic oligonucleotide
cgccuaccgcugccgaggaaacu

SEQ ID NO: 817 - RNA, 23 nt, Artificial sequence
  Synthetic oligonucleotide
gcacgcuccuccgcgugcucucg

SEQ ID NO: 818 - RNA, 23 nt, Artificial sequence
  Synthetic oligonucleotide
ucugcccgcgccgccaccgccgc

SEQ ID NO: 819 - RNA, 23 nt, Artificial sequence
  Synthetic oligonucleotide
ugggauccgccgcguccuugcuc

SEQ ID NO: 820 - RNA, 23 nt, Artificial sequence
  Synthetic oligonucleotide
ccgagugcgcugcugugcgagug

SEQ ID NO: 821 - RNA, 23 nt, Artificial sequence
  Synthetic oligonucleotide
auccugcagaaaauuguuuugga

SEQ ID NO: 822 - RNA, 23 nt, Artificial sequence
  Synthetic oligonucleotide
uaauuuauuuauguaauacagug

SEQ ID NO: 823 - RNA, 23 nt, Artificial sequence
  Synthetic oligonucleotide
uguagaaagcgaucaugucauaa

SEQ ID NO: 824 - RNA, 23 nt, Artificial sequence
  Synthetic oligonucleotide
aagcaaugauucuguacaaucau

SEQ ID NO: 825 - RNA, 23 nt, Artificial sequence
  Synthetic oligonucleotide
cuugcccgggguuauuuuauuua

SEQ ID NO: 826 - RNA, 23 nt, Artificial sequence
  Synthetic oligonucleotide
agucauccuucaaagaaaagucu

SEQ ID NO: 827 - RNA, 23 nt, Artificial sequence
  Synthetic oligonucleotide
cuucgauuauuuaaugucuguag

SEQ ID NO: 828 - RNA, 23 nt, Artificial sequence
  Synthetic oligonucleotide
uuaaagaaaauugaaucugccuc

SEQ ID NO: 829 - RNA, 23 nt, Artificial sequence
  Synthetic oligonucleotide
ucuucuccccacccaaaauuacu

SEQ ID NO: 830 - RNA, 23 nt, Artificial sequence
  Synthetic oligonucleotide
auuuucaucuucuuuuguaucau

SEQ ID NO: 831 - RNA, 23 nt, Artificial sequence
  Synthetic oligonucleotide
auaaaugaaacuucagacugguu

SEQ ID NO: 832 - RNA, 23 nt, Artificial sequence
  Synthetic oligonucleotide
uguccaggcaugccuuccucauc

SEQ ID NO: 833 - RNA, 23 nt, Artificial sequence
  Synthetic oligonucleotide
uccccuuauauugccacuuccau

SEQ ID NO: 834 - RNA, 23 nt, Artificial sequence
  Synthetic oligonucleotide
acacaucuuaaaagaaggguuug

SEQ ID NO: 835 - RNA, 23 nt, Artificial sequence
  Synthetic oligonucleotide
uguauuuauuuacaugaaaacac

SEQ ID NO: 836 - RNA, 23 nt, Artificial sequence
  Synthetic oligonucleotide
accauuuuauacaaauugaagac

SEQ ID NO: 837 - RNA, 23 nt, Artificial sequence
  Synthetic oligonucleotide
ugcuccuccaagaauguauuuau

SEQ ID NO: 838 - RNA, 23 nt, Artificial sequence
  Synthetic oligonucleotide
gaauggcgcugccacacacggcc

SEQ ID NO: 839 - RNA, 23 nt, Artificial sequence
  Synthetic oligonucleotide
uacuggcugcuguuguaggaaug

SEQ ID NO: 840 - RNA, 23 nt, Artificial sequence
  Synthetic oligonucleotide
acugacggagcccgagcgcggcg

SEQ ID NO: 841 - RNA, 21 nt, Artificial sequence
  Synthetic oligonucleotide
gcgggggccccgggagacggc

SEQ ID NO: 842 - RNA, 21 nt, Artificial sequence
  Synthetic oligonucleotide
uuuccucggcagcgguaggcg

SEQ ID NO: 843 - RNA, 21 nt, Artificial sequence
  Synthetic oligonucleotide
agagcacgcggaggagcgugc

SEQ ID NO: 844 - RNA, 21 nt, Artificial sequence
  Synthetic oligonucleotide
ggcgguggcggcgcgggcaga

SEQ ID NO: 845 - RNA, 21 nt, Artificial sequence
  Synthetic oligonucleotide
gcaaggacgcggcggauccca

SEQ ID NO: 846 - RNA, 21 nt, Artificial sequence
  Synthetic oligonucleotide
cucgcacagcagcgcacucgg

SEQ ID NO: 847 - RNA, 21 nt, Artificial sequence
  Synthetic oligonucleotide
caaaacaauuuucugcaggau

SEQ ID NO: 848 - RNA, 21 nt, Artificial sequence
  Synthetic oligonucleotide
cuguauuacauaaauaaauua

SEQ ID NO: 849 - RNA, 21 nt, Artificial sequence
  Synthetic oligonucleotide
augacaugaucgcuuucuaca

SEQ ID NO: 850 - RNA, 21 nt, Artificial sequence
  Synthetic oligonucleotide
gauuguacagaaucauugcuu

SEQ ID NO: 851 - RNA, 21 nt, Artificial sequence
  Synthetic oligonucleotide
aauaaaauaaccccgggcaag

SEQ ID NO: 852 - RNA, 21 nt, Artificial sequence
  Synthetic oligonucleotide
acuuuucuuugaaggaugacu

SEQ ID NO: 853 - RNA, 21 nt, Artificial sequence
  Synthetic oligonucleotide
acagacauuaaauaaucgaag

SEQ ID NO: 854 - RNA, 21 nt, Artificial sequence
  Synthetic oligonucleotide
ggcagauucaauuuucuuuaa

SEQ ID NO: 855 - RNA, 21 nt, Artificial sequence
  Synthetic oligonucleotide
uaauuuuggguggggagaaga

SEQ ID NO: 856 - RNA, 21 nt, Artificial sequence
  Synthetic oligonucleotide
gauacaaaagaagaugaaaau

SEQ ID NO: 857 - RNA, 21 nt, Artificial sequence
  Synthetic oligonucleotide
ccagucugaaguuucauuuau

SEQ ID NO: 858 - RNA, 21 nt, Artificial sequence
  Synthetic oligonucleotide
ugaggaaggcaugccuggaca

SEQ ID NO: 859 - RNA, 21 nt, Artificial sequence
  Synthetic oligonucleotide
ggaaguggcaauauaagggga

SEQ ID NO: 860 - RNA, 21 nt, Artificial sequence
  Synthetic oligonucleotide
aacccuucuuuuaagaugugu

SEQ ID NO: 861 - RNA, 21 nt, Artificial sequence
  Synthetic oligonucleotide
guuuucauguaaauaaauaca

SEQ ID NO: 862 - RNA, 21 nt, Artificial sequence
  Synthetic oligonucleotide
cuucaauuuguauaaaauggu

SEQ ID NO: 863 - RNA, 21 nt, Artificial sequence
  Synthetic oligonucleotide
aaauacauucuuggaggagca

SEQ ID NO: 864 - RNA, 21 nt, Artificial sequence
  Synthetic oligonucleotide
ccguguguggcagcgccauuc

SEQ ID NO: 865 - RNA, 21 nt, Artificial sequence
  Synthetic oligonucleotide
uuccuacaacagcagccagua

SEQ ID NO: 866 - RNA, 21 nt, Artificial sequence
  Synthetic oligonucleotide
ccgcgcucgggcuccgucagu

SEQ ID NO: 867 - RNA, 23 nt, Artificial sequence
  Synthetic oligonucleotide
ggaacucgaaccaccucuuccac

SEQ ID NO: 868 - RNA, 23 nt, Artificial sequence
  Synthetic oligonucleotide
uaggaacucgaaccaccucuucc

SEQ ID NO: 869 - RNA, 23 nt, Artificial sequence
  Synthetic oligonucleotide
aacucgaaccaccucuuccacag

SEQ ID NO: 870 - RNA, 23 nt, Artificial sequence
  Synthetic oligonucleotide
aggaacucgaaccaccucuucca

SEQ ID NO: 871 - RNA, 23 nt, Artificial sequence
  Synthetic oligonucleotide
gaacucgaaccaccucuuccaca

SEQ ID NO: 872 - RNA, 23 nt, Artificial sequence
  Synthetic oligonucleotide
acucgaaccaccucuuccacaga

SEQ ID NO: 873 - RNA, 23 nt, Artificial sequence
  Synthetic oligonucleotide
uacuggcugcuguuguaggaacu

SEQ ID NO: 874 - RNA, 23 nt, Artificial sequence
  Synthetic oligonucleotide
uuguaggaacucgaaccaccucu

SEQ ID NO: 875 - RNA, 23 nt, Artificial sequence
  Synthetic oligonucleotide
acuggcugcuguuguaggaacuc

SEQ ID NO: 876 - RNA, 23 nt, Artificial sequence
  Synthetic oligonucleotide
guaggaacucgaaccaccucuuc

SEQ ID NO: 877 - RNA, 23 nt, Artificial sequence
  Synthetic oligonucleotide
guacuggcugcuguuguaggaac

SEQ ID NO: 878 - RNA, 23 nt, Artificial sequence
  Synthetic oligonucleotide
guuguaggaacucgaaccaccuc

SEQ ID NO: 879 - RNA, 23 nt, Artificial sequence
  Synthetic oligonucleotide
cuguuguaggaacucgaaccacc

SEQ ID NO: 880 - RNA, 23 nt, Artificial sequence
  Synthetic oligonucleotide
uguaggaacucgaaccaccucuu

SEQ ID NO: 881 - RNA, 23 nt, Artificial sequence
  Synthetic oligonucleotide
uguuguaggaacucgaaccaccu

SEQ ID NO: 882 - RNA, 23 nt, Artificial sequence
  Synthetic oligonucleotide
ugcuguuguaggaacucgaacca

SEQ ID NO: 883 - RNA, 23 nt, Artificial sequence
  Synthetic oligonucleotide
gcuguuguaggaacucgaaccac

SEQ ID NO: 884 - RNA, 23 nt, Artificial sequence
  Synthetic oligonucleotide
cugcuguuguaggaacucgaacc

SEQ ID NO: 885 - RNA, 23 nt, Artificial sequence
  Synthetic oligonucleotide
ggcugcuguuguaggaacucgaa

SEQ ID NO: 886 - RNA, 23 nt, Artificial sequence
  Synthetic oligonucleotide
uggcugcuguuguaggaacucga

SEQ ID NO: 887 - RNA, 23 nt, Artificial sequence
  Synthetic oligonucleotide
gcugcuguuguaggaacucgaac

SEQ ID NO: 888 - RNA, 23 nt, Artificial sequence
  Synthetic oligonucleotide
cuggcugcuguuguaggaacucg

SEQ ID NO: 889 - RNA, 21 nt, Artificial sequence
  Synthetic oligonucleotide
ggaagaggugguucgaguucc

SEQ ID NO: 890 - RNA, 21 nt, Artificial sequence
  Synthetic oligonucleotide
aagaggugguucgaguuccua

SEQ ID NO: 891 - RNA, 21 nt, Artificial sequence
  Synthetic oligonucleotide
guggaagaggugguucgaguu

SEQ ID NO: 892 - RNA, 21 nt, Artificial sequence
  Synthetic oligonucleotide
gaagaggugguucgaguuccu

SEQ ID NO: 893 - RNA, 21 nt, Artificial sequence
  Synthetic oligonucleotide
uggaagaggugguucgaguuc

SEQ ID NO: 894 - RNA, 21 nt, Artificial sequence
  Synthetic oligonucleotide
uguggaagaggugguucgagu

SEQ ID NO: 895 - RNA, 21 nt, Artificial sequence
  Synthetic oligonucleotide
aggugguucgaguuccuacaa

SEQ ID NO: 896 - RNA, 21 nt, Artificial sequence
  Synthetic oligonucleotide
guuccuacaacagcagccagu

SEQ ID NO: 897 - RNA, 21 nt, Artificial sequence
  Synthetic oligonucleotide
agaggugguucgaguuccuac

SEQ ID NO: 898 - RNA, 21 nt, Artificial sequence
  Synthetic oligonucleotide
uccuacaacagcagccaguac

SEQ ID NO: 899 - RNA, 21 nt, Artificial sequence
  Synthetic oligonucleotide
ggugguucgaguuccuacaac

SEQ ID NO: 900 - RNA, 21 nt, Artificial sequence
  Synthetic oligonucleotide
ugguucgaguuccuacaacag

SEQ ID NO: 901 - RNA, 21 nt, Artificial sequence
  Synthetic oligonucleotide
gaggugguucgaguuccuaca

SEQ ID NO: 902 - RNA, 21 nt, Artificial sequence
  Synthetic oligonucleotide
gugguucgaguuccuacaaca

SEQ ID NO: 903 - RNA, 21 nt, Artificial sequence
  Synthetic oligonucleotide
guucgaguuccuacaacagca

SEQ ID NO: 904 - RNA, 21 nt, Artificial sequence
  Synthetic oligonucleotide
gguucgaguuccuacaacagc

SEQ ID NO: 905 - RNA, 21 nt, Artificial sequence
  Synthetic oligonucleotide
uucgaguuccuacaacagcag

SEQ ID NO: 906 - RNA, 21 nt, Artificial sequence
  Synthetic oligonucleotide
cgaguuccuacaacagcagcc

SEQ ID NO: 907 - RNA, 21 nt, Artificial sequence
  Synthetic oligonucleotide
gaguuccuacaacagcagcca

SEQ ID NO: 908 - RNA, 21 nt, Artificial sequence
  Synthetic oligonucleotide
ucgaguuccuacaacagcagc

SEQ ID NO: 909 - RNA, 21 nt, Artificial sequence
  Synthetic oligonucleotide
aguuccuacaacagcagccag

SEQ ID NO: 910 - DNA, 21 bp, Artificial sequence
  Primer
ccttcccgtgaatggagagtt

SEQ ID NO: 911 - DNA, 21 bp, Artificial sequence
  Primer
cacagagtcagccccaaaaga

SEQ ID NO: 912 - DNA, 22 bp, Artificial sequence
  Probe
cctggacgatctccagccgtgg

SEQ ID NO: 913 - DNA, 21 bp, Artificial sequence
  Primer
cccactttgtgattccctacc

SEQ ID NO: 914 - DNA, 21 bp, Artificial sequence
  Primer
atccatcctctcctggtgtaa

SEQ ID NO: 915 - DNA, 24 bp, Artificial sequence
  Probe
tgatgcccttctcgttcctgacaa

1.-4. (canceled)

5. An oligomeric compound comprising a modified oligonucleotide consisting of 12 to 30 linked nucleosides wherein the nucleobase sequence of the modified oligonucleotide is complementary to at least 8, at least 9, at least 10, at least 11, at least 12, at least 13, at least 14, at least 15, at least 16, at least 17, at least 18, at least 19, at least 20, or at least 21 contiguous nucleobases of:
an equal length portion of nucleobases 40-78 of SEQ ID NO: 1;
an equal length portion of nucleobases 69-146 of SEQ ID NO: 1;
an equal length portion of nucleobases 83-129 of SEQ ID NO: 1;
an equal length portion of nucleobases 83-246 of SEQ ID NO: 1;
an equal length portion of nucleobases 94-225 of SEQ ID NO: 1;
an equal length portion of nucleobases 194-231 of SEQ ID NO: 1;
an equal length portion of nucleobases 194-238 of SEQ ID NO: 1;
an equal length portion of nucleobases 236-268 of SEQ ID NO: 1;
an equal length portion of nucleobases 258-288 of SEQ ID NO: 1;
an equal length portion of nucleobases 285-311 of SEQ ID NO: 1;
an equal length portion of nucleobases 296-321 of SEQ ID NO: 1;
an equal length portion of nucleobases 307-330 of SEQ ID NO: 1;
an equal length portion of nucleobases 329-352 of SEQ ID NO: 1;
an equal length portion of nucleobases 330-352 of SEQ ID NO: 1;
an equal length portion of nucleobases 339-383 of SEQ ID NO: 1;
an equal length portion of nucleobases 415-439 of SEQ ID NO: 1;
an equal length portion of nucleobases 413-477 of SEQ ID NO: 1;
an equal length portion of nucleobases 415-477 of SEQ ID NO: 1;
an equal length portion of nucleobases 477-506 of SEQ ID NO: 1;
an equal length portion of nucleobases 477-523 of SEQ ID NO: 1;
an equal length portion of nucleobases 477-541 of SEQ ID NO: 1;
an equal length portion of nucleobases 530-557 of SEQ ID NO: 1;
an equal length portion of nucleobases 581-638 of SEQ ID NO: 1;
an equal length portion of nucleobases 636-661 of SEQ ID NO: 1;
an equal length portion of nucleobases 652-697 of SEQ ID NO: 1;
an equal length portion of nucleobases 728-821 of SEQ ID NO: 1;
an equal length portion of nucleobases 770-821 of SEQ ID NO: 1;
an equal length portion of nucleobases 920-950 of SEQ ID NO: 1;
an equal length portion of nucleobases 1006-1049 of SEQ ID NO: 1;
an equal length portion of nucleobases 1152-1179 of SEQ ID NO: 1;
an equal length portion of nucleobases 1227-1265 of SEQ ID NO: 1;
an equal length portion of nucleobases 1227-1274 of SEQ ID NO: 1;
an equal length portion of nucleobases 1268-1332 of SEQ ID NO: 1;
an equal length portion of nucleobases 1268-1311 of SEQ ID NO: 1;
an equal length portion of nucleobases 1289-1332 of SEQ ID NO: 1;
an equal length portion of nucleobases 1518-1543 of SEQ ID NO: 1;
an equal length portion of nucleobases 1531-1593 of SEQ ID NO: 1;
an equal length portion of nucleobases 1544-1593 of SEQ ID NO: 1;
an equal length portion of nucleobases 1634-1657 of SEQ ID NO: 1;
an equal length portion of nucleobases 1778-1800 of SEQ ID NO: 1;
an equal length portion of nucleobases 1882-1908 of SEQ ID NO: 1;
an equal length portion of nucleobases 2051-2074 of SEQ ID NO: 1;
an equal length portion of nucleobases 2360-3117 of SEQ ID NO: 1;
an equal length portion of nucleobases 2402-3117 of SEQ ID NO: 1;
an equal length portion of nucleobases 2360-2655 of SEQ ID NO: 1;
an equal length portion of nucleobases 2402-2655 of SEQ ID NO: 1;
an equal length portion of nucleobases 2675-3054 of SEQ ID NO: 1; or
an equal length portion of nucleobases 3192-3277 of SEQ ID NO: 3;
wherein the modified oligonucleotide comprises at least one modification selected from a modified sugar and a modified internucleoside linkage.

6. The oligomeric compound of claim 5, wherein the nucleobase sequence of the modified oligonucleotide is at least 80%, at least 85%, at least 90%, at least 95%, or 100% complementary to the nucleobase sequences of any of SEQ ID NO: 1-7 when measured across the entire nucleobase sequence of the modified oligonucleotide.

7. The oligomeric compound of claim 5, wherein at least one nucleoside of the modified oligonucleotide is a modified nucleoside.

8. The oligomeric compound of claim 7, wherein at least one modified nucleoside of the modified oligonucleotide comprises a modified sugar moiety.

9. The oligomeric compound of claim 8, wherein at least one modified nucleoside of the modified oligonucleotide comprises a bicyclic sugar moiety.

10. The oligomeric compound of claim 9, wherein at least one modified nucleoside of the modified oligonucleotide comprises a bicyclic sugar moiety having a 2′-4′ bridge, wherein the 2′-4′ bridge is selected from —O—CH₂— and —O—CH(CH₃)—.

11. The oligomeric compound of claim 7, wherein at least one modified nucleoside of the modified oligonucleotide comprises a non-bicyclic modified sugar moiety.

12. The oligomeric compound of claim 11, wherein at least one modified nucleoside of the modified oligonucleotide comprises a bicyclic sugar moiety having a 2′-4′ bridge and at least one modified nucleoside of the modified oligonucleotide comprises a non-bicyclic modified sugar moiety.

13. The oligomeric compound of claim 11, wherein the non-bicyclic modified sugar moiety is a 2′-MOE modified sugar moiety, a 2′-OMe modified sugar moiety, or a 2′-F modified sugar moiety.

14. The oligomeric compound of claim 5, wherein the modified oligonucleotide comprises at least one modified nucleoside comprising a sugar surrogate.

15. The oligomeric compound of claim 14, wherein at least one modified nucleoside of the modified oligonucleotide comprises a sugar surrogate selected from morpholino and PNA.

16. The oligomeric compound of claim 5, wherein the modified oligonucleotide comprises at least one modified internucleoside linkage.

17. The oligomeric compound of claim 16, wherein each internucleoside linkage of the modified oligonucleotide is a modified internucleoside linkage.

18. The oligomeric compound of claim 16, wherein at least one modified internucleoside linkage is a phosphorothioate internucleoside linkage.

19. The oligomeric compound of claim 16, wherein the modified oligonucleotide comprises at least one phosphodiester internucleoside linkage.

20. The oligomeric compound of claim 16, wherein each internucleoside linkage of the modified oligonucleotide is independently selected from a phosphodiester internucleoside linkage or a phosphorothioate internucleoside linkage.

21. The oligomeric compound of claim 5, wherein the modified oligonucleotide comprises at least one modified nucleobase.

22. The oligomeric compound of claim 21, wherein the modified nucleobase is a 5-methyl cytosine.

23. (canceled)

24. The oligomeric compound of claim 5, wherein the modified oligonucleotide consists of 18-21 linked nucleosides.

25.-28. (canceled)

29. The oligomeric compound of claim 5, wherein the modified oligonucleotide is a gapmer.

30. The oligomeric compound of claim 5, wherein the modified oligonucleotide has a sugar motif comprising:
a 5′-region consisting of 1-6 linked 5′-region nucleosides;
a central region consisting of 6-10 linked central region nucleosides; and
a 3′-region consisting of 1-6 linked 3′-region nucleosides;
wherein the 3′-most nucleoside of the 5′-region and the 5′-most nucleoside of the 3′-region comprise modified sugar moieties, and
each of the central region nucleosides is selected from a nucleoside comprising a 2′-β-D-deoxyribosyl sugar moiety and a nucleoside comprising a 2′-substituted sugar moiety, wherein the central region comprises at least six nucleosides comprising a 2′-β-D-deoxyribosyl sugar moiety and no more than two nucleosides comprising a 2′-substituted sugar moiety.

31. The oligomeric compound of claim 5, wherein the modified oligonucleotide has a sugar motif comprising:
a 5′-region consisting of 1-6 linked 5′-region nucleosides;
a central region consisting of 6-10 linked central region nucleosides; and
a 3′-region consisting of 1-6 linked 3′-region nucleosides; wherein
each of the 5′-region nucleosides and each of the 3′-region nucleosides comprises a modified sugar moiety and each of the central region nucleosides comprises a 2′-β-D-deoxyribosyl sugar moiety.

32. (canceled)

33. (canceled)

34. The oligomeric compound of claim 5, wherein the oligomeric compound comprises an antisense RNAi oligonucleotide comprising a targeting region comprising at least 15, 19, 20, 21, or 25 contiguous nucleobases, wherein the targeting region is at least 90% complementary, at least 95% complementary, or is 100% complementary to an equal-length portion of an APP RNA having the nucleobase sequence of any of SEQ ID NOs: 1-7.

35.-42. (canceled)

43. The oligomeric compound of claim 5, wherein the oligomeric compound is a single-stranded oligomeric compound.

44.-52. (canceled)

53. An oligomeric duplex, comprising a first oligomeric compound comprising an antisense RNAi oligonucleotide of claim 34 and a second oligomeric compound comprising a sense RNAi oligonucleotide consisting of 17 to 30 linked nucleosides, wherein the nucleobase sequence of the sense RNAi oligonucleotide comprises an antisense-hybridizing region comprising least 15 contiguous nucleobases wherein the antisense-hybridizing region is at least 90% complementary to an equal length portion of the antisense RNAi oligonucleotide.

54. (canceled)

55. The oligomeric duplex of claim 53, wherein the sense RNAi oligonucleotide consists of 21 or 23 linked nucleosides.

56. The oligomeric duplex of claim 53, wherein 1-4 of the 3′-most nucleosides of the antisense RNAi oligonucleotide or the sense RNAi oligonucleotide are overhanging nucleosides.

57. The oligomeric duplex of claim 53, wherein 1-4 of the 5′-most nucleosides of the antisense RNAi oligonucleotide or the sense RNAi oligonucleotide are overhanging nucleosides.

58. The oligomeric duplex of claim 53, wherein the duplex is blunt ended at the 3′-end or at the 5′-end of the antisense RNAi oligonucleotide.

59.-66. (canceled)

67. The oligomeric duplex of claim 53, consisting of the antisense RNAi oligonucleotide and the sense RNAi oligonucleotide.

68.-76. (canceled)

77. A pharmaceutical composition comprising an oligomeric compound of claim 5 and a pharmaceutically acceptable carrier or diluent.

78. The pharmaceutical composition of claim 77, wherein the pharmaceutically acceptable diluent is artificial cerebral spinal fluid, sterile saline, or PBS.

79. (canceled)

80. (canceled)

81. A method of treating a disease associated with APP comprising administering to an individual having or at risk for developing a disease associated with APP a therapeutically effective amount of a pharmaceutical composition according to claim 77; and thereby treating the disease associated with APP.

82. The method of claim 81, wherein the disease associated with APP is Alzheimer's Disease, Alzheimer's Disease in a Down Syndrome patient, or Cerebral Amyloid Angiopathy.

83. The method of claim 81, wherein at least one symptom or hallmark of the disease associated with APP is ameliorated, wherein the symptom or hallmark comprises cognitive impairment, behavioral and psychological symptoms, gait disturbances seizures, progressive dementia, and/or abnormal amyloid deposits.

84. (canceled)
